United States Patent Application Publication US 2022/0008368 A1 - sequence listing, part 5

SEQ ID NO: 2 - DNA, 58617616 bp, Homo sapiens (residues 8,684,093-10,855,115 of 58,617,616)
  modified_base (1)..(60000): a, c, t, g, unknown or other
  modified_base (24448981)..(24498980): a, c, t, g, unknown or other
  modified_base (24552653)..(24552752): a, c, t, g, unknown or other
  modified_base (24891257)..(24891356): a, c, t, g, unknown or other
  modified_base (24895791)..(24895890): a, c, t, g, unknown or other
  modified_base (24898314)..(24904771): a, c, t, g, unknown or other
  modified_base (24908590)..(24908689): a, c, t, g, unknown or other
  modified_base (27190875)..(27240874): a, c, t, g, unknown or other
  modified_base (58607617)..(58617616): a, c, t, g, unknown or other
ccctttttgcgtgggagacacagcatatgcgtgttcacgtatgtgctcagatcagggcgtgtaggtgtgggcatgatacctacatgtatacacatgtgtgcttgagcctgggggtgaaggaaccgcctcaagtctctccatatgcccccccacaagccgtgttgtggggctgaagccttgcggaggatgtaggggatgggggagagttgagttccctcccctaaggccactggtgtgccccctcccccatcaccccatctctcccgcctatgaaggacctgggagcagccccagcctcccctctcccccatactgtaaattctgagaaatcctgtcctgtggtttggcctaggccgtcctcgcccgccttcgtccccagcagggctgccctggccactgtcttcctgtcttggggcctgggtttggggtcatggggaaagactaagaacccccgtcccagcctgggttcttagacagaggggagagggctctgccctgcttctcacgactttgctttgcctctctgggcctcagtttcctcttctacagaatggggataattgtagttcctaccccccgagggctgtgggagaagtcgaggaggtgacacccacggggaggtgagagctgagtctggcaggtcctaacgcacctgctacatgctggctgtcactgttattcattttctgcatcttgctttactccagactccacacttttatcctcgctgttcccttacacagaatgtcctcatccctctcctccttggcaaacccaggaataatccaaatcctaactcaaattccatttcctccggaaacaggggagggtggtgagatgagctggatctggcaggcaggaaacctgggatctcaactctgccacggacatgctggatggctttgagcaggccactgtgccacaccgtgactcagtttccccattcgagctctgatgctccagggtttttttttttttgagtctctttttttttgagtctcttttttttttttgagtctcttttttttttgagtctcttttttttttttgagatggagtctcgcactgttgccaggctggagtgcagtggtgcgatctctgctcactgcaacctccccttcgtgggttcaagcgattctcctgcctcagcctcccaagtagctgggattacaggcatgtgccaccatgcctggataatttttgtatttttagtagagatggggtttcaccatgtaggccaggcttgtctcgaactgaggtcagttgatctgcctgccttggcctcccaaagtgctgggattataggcgtgagccattgcacctggcccgcagtgttccttttttttttttttaatgttttcttttttcttgacacatggtcttgctctgtcacccaggcagtggcatgatcatagctcactgcagccttgaactcctggctcaagtgatcctcccacctcagcctcccaagtaactgggactacaggcgtgtgccaccatgccaggctaattttttagcttttgtagagtcagggtcttgctgtgttgctcaggctggttgcaaactcctgagctcaactgattctcctgcctctgcctcccagtgttgggattacaggtataaggcactgcacctggtacttggtgtcaaattgtaaaatgaagccaagcttgcccctgcatctgctcagcctgaattggtggcctcaacatcatctctgctgggttcatcatttccctagtggaataaccctgtcttctccaaatacttcctctcctgggcctcgcaataaacaggggccctctctctctgctcaaacccttgagagagggtgtccaggtcctgggttgctgtctgtctgtctgtctgtctggagggtgagtccaaggctggactcgggggtccgtctttggcacgatctagttgcaacagcagccccaccatctgttgagagcttgctgtgtactaagcatgctaagtccacttcatgcattagtcaaaaagcagttttaaaaatttatgtctggccaggcgcggtggctcacgcctgtaatcccaggactttgggaggccgaggcgagcagatcatttgaggttaggaattcgagatcagcctggccaacatggtgaaacgctgtttctactaaaaatacaaaaattaggctgggtgtggtggcagcgcctgtaatcccagctactcaggaggctgaggtaggagaatcgcttggacccaggaggcagaggttgcagtgagctgagattgcaccaccgcactccagcctgagtgatagagtgagactcagtctccaaaaaaaaaaaaaaaaaaaaaaaaatattatgtctatggaggcatttgcatcataaaacattcaaacaattacattcatatataaactcaaaagattccagcctcccatcttaaaggtgactgaaatttaagagatgtccttctacactgcccagagagcctgcatgagctcattttatcttcataaaactcccctgaagtgagcgctgacatggctgtatttttcaggtgaggctcagagaggtcaggccacttgtctaaggtcacacagcgtgggaggaagctgcctggaacccaggcctgtctgactccaatgcccaaggaagagaggggaagtggcctcccacggaagaggattcttcttggctcattcattcagtcactcaatgatgtttgaatgttttgaatcattcagtcattcaacaaacatgtattgggcatgactgtgtgatgagtgctgttgaaactggggacatagcagtgacacggggggggcctgtcctcatggaactcgtgatagggatggtgacaccattgattaacaagaaattaaacagaaatttgatggtcacaactagggagaagattaggaaggaaaaagaactgtctgggtggacaccagaggaacctaaagcaaacatccatattttaaaatatactcatggccaggcatggtggctcacatctgtaatcccagcactttgggaggctgaggcaggaggattgctggagctgaggaattcgaaaccagcctgggtgacatagtgagaccctatctctacataaaattaaaaaaaaaaatccagatgtgggggcatgtgcctgtagtgccagctactcagagggctgaggtgggaggattgcttgagctgggttggaggaggttataatcatggctgcagtgagccgtgactgtgccactgtacccagcctgggcaacagagtgagaccctgtctcaaaaaaaaatatgtattacatatttatattcacatggttcaaaatgtaaatacttcagttgggcagctatgcaatatatccatcatattaaactttcatggcaggggaggaactaggataaacatgtttaaaaagcctccttaggggtaataatgaaatgaaagctgagaaacactggcatagaagctgccgccgttcaatttttctttttgtgatctttgagatagtctagacattttattttttgctttatcttttgatttttttttttttgagaggagtctcactgtgtcaccaggctggagtgcagtggcacgatctcagctcactgcaatgcccgcctcccgagttcatgcgattcctctgcctcagcctcccgaatagctgggactacaggcacgtgccaccattcctggctaattttttatattttagtagagacggggtttcaccacgttggccaggattgtctcgatctccttatctcatgatctgtctgccttggcttcccaaagtgttgggattacaggcgtgagccactgcacctggcctaaaaaaattattttaatgaaaaacatttaaaaaaatttgttttgtagagatgtgttctcactttgttgcccaagctggtctcgagttctaggctcgagtgactgtctcccctcagcctcccacgattacaggtgtgagctaccactcccagcctattctagactttttaaaaaatttttttttttattgagacagggtcttgctctgttgcccaggctggagggcagaggtgtgatcacggctcactgcagcctcaaactcctgggctcgagccatcctcctgccacaaacccctgagtagctgggattacagaggtgcaccaccacccccggctaatttttgtatttttgtagagactgaggtcccactatgttgcccaggctggtctcgaactcctggcctcaagcagtcttctggcttctgcctcccaaaatgctgggattacaggtgtgagccactgtgtctgatctattctagactttctttccttctttctttctttcttttttctttcttcctttctttcttttctttctttctctctctctctctttctttcttcttttcttttctttctttttttttttttttaaatcttgctccaggctgggcgtgatggatcacgcctgtaatcccagcactttgggaggccgaggcgggtgtgtcatgaggtcaggagatcgagaccatcctgcctaacatggtgagaccccgtctctactaaaaatacaaaaaattagccgggcgtggtgttgggagcctataatcccagctactcgggaggctgaggcaggagaatggcgtgaacccgggaggcggagcttgcagtgagcagagatcgcgccactgcactccaacctgggtgacagagcgagactccgtctcaaaaacaaacaaacaaacaaaaacaacaacaaaaaaaacttgctccaaacctcagaatgttctagacattttaaagcaaatgcccacatctccttttattcctctttttatgttaatgataacatactgttctgggctttcttttttcccaaactatatcttggggatcactccatgtcagaacacagcttgctcatttcttttaaaacccgtgtagtatttctcttctgttggaatacaatttatttaatcggtttgtctggatggtcgcgtgtcttgtttccagtgttttgcggccagaaagcgccgcgtcacggatgatggataactgcattgacgtcatttcgcgtaaaagttgattgtatcagaaggagaggttcctggaagtgccatagctgggccaggtgtttgcggctggaatatgtcctgtatagggttgtaccaatttccctccccactttcaaggcaaaacagtactagtttccccagagtctcaccaacggtgagtattatcaaatcttttgatcgccaatctgatgggttaaaaacgacatcgcagtataggtgtagtgttcatttcccttatgaaattgagcatcttctcctgtgtctaagaaccgtttgtccgtctttcttaatgagctgtgtgttcatatcctttgctaactttttcacggacccttgaggtatttttcctattgattctttctgagagctctttatatatgacagacattattcctttgtgttatgagtttcaagtatttttttccatttgtcattacaaattattatttattattattattattatttttgagacagagtcttgctgtgtcacccaggctggagtgcaatggcttgatctcagctcactgcaacctccgcctcctgggttcaagagattctcctgcctcagcctcctgagtagctgggattacaggcgcctaccaccacacctggctaatttttgtatttttagtagagacaaggtttcaccatgttggccaggctggtctcgaactcctgaccttgtgatccacccacctcggcctcccaaagtgctgggattataggcgggagccaccgccccgacctatttattatttttaagtggtcatttgtcttttgactttgatgagggtgatttttaccttgcggagtttttgggggtgtttacacaaagtcaactgttgtaatcatttcttttgtggcagctgagatttgtggggctacctttgataagatgggagagagagattgagattaatttattttttatttcaatttttttcagtgcttttcaaaccttatttatttattttttttagacagagtctcactctgttacccagcctggagtgcagtggtgctatttcagttcattgcaacttccacttcccgggttcaagagattcttttgccttagcttcctgggtagctgggactacaggcacctgccaccacacccagctaatttttctttttaatagagatggggtttcgccatgttggccaggctggattcgaactcctgacctcaagcgatccacctgccttgggctcccaaagtgctgggattacaggtgtgagccaccatgcctggccgcttttcaaactttaatgtgctgaggaatcccgtgtggattttgttaaaatgactcagtgggtcttgagtaggatctgagattccccttttattttcttttcttcttttcttttcttttcctttcttcccaggatctttctctgtcacacaagctggagtgcagtggtatgattatagctcaccatagcctccaagtcctgggctcaagcaatcctcccgcctcagcctcttgagtagctgggactacaggtgcacaccatcacatctggctaatatttttattttggtagagataggatctcactatgttgcctaggctggtctccaactcctgggctcaagtgatcctcccacctcagcctccctaagtgctgggattacaggcacgagtcaccatgcctggcctaataaaccttatgttacatgataagagaagggataagacaaaggtattttatatacatgtaaacatattcatagcaagttaaggaagacatattggtgacagctacagtcttcatttctgtaactggtcacgtggttatagctgttatttttaactaactttagaacaattcttggtatcaaagtttgcgttcgtttgttcaggctgtaaagtatcccagactgggtggcttaaacaacagaaatgtatagccttacagttctgggggctggaagtccaagttcaaggtgtcagcagggttgattccttctgaggcctctctccttgtagatgactgtcttctccgtgtcttcacatgtttgtccctctgtgtgtgtctatgtcccaatctattctttctctctctttcttttctttttctttctttctttctttctttcctttctttctctctctcttccttccttcctttctccctgtctctttctttctgtttccttccttcctttcttccttccttctttcctttctctctctctttctgtttccttccttcctttcttccttccttcttttctttctttctctctctccttcctccttccctcccttccttccattccttccctccctccctcttccctttctgtctctctttctttctttctccttccttcctttatcccttctttcatttctttctctctccttcctccctccctccctccctcttttctttctttctttctttctttctttctttcttctttctttctttctttcactttctttcttgatggagtctcattctgtcactctttctttctttcgagatggagtctcattctgtcccccaggctggagtgcagtggcacaatctcggctcactgcaatctccgcctcctgggttcaagtgattctctagcctcagcctccagagtagctgggattacaggcatgtgccacaactcctggctaattttttctatatttttaatagagatggggtttcactatgttggccaggctggtcttgaactcctgacttcaagtgatccgcccatctcagcctctgaaagtgctgggattataggcatgagctatcatgcctggccccaatctcttctgatgtccaatcagtcatactggatgaggctgcaccctgaagacctcattttcacttaattattacttgaaagttctaatctccaaatacagtcccattctcaggtactgggggttgggctttcaacatatgaattttggcgggacatagtgcatcccataactggaagagaaaggcaggcagtgtggctggaggtaaaggggattaggagggatgccaaggagaggtttagagagatcagcagaggattcagggccataggaagaacttggtttatttgcacgaaatgaaaaggcataggctggctgagcatggtggatcatgcctgtaatcccagcactctgggaggccgaagcaggaagattgagcccaggagtttgacaagagcctgggcaacatagtgggacctcatctctacaaaaaaacttaaaaaatagctggttgtggtagtacacacctgtagtcccagctactccagaggctgaggtaagaggattacttaagcccagaagttcaaggttacagtcagctatgactgagtcactgcactctagcctgggtaacagaatgagaccctgtttcagaaaagaaaaaaagaaaagaaaagaaaagaaggaaggaagaaaggaatgagggaaggaaggaagaaaggaatgagggaaggaaggaagaaaggaatgagggaaggaaggaagaaaggaatgagggaaggaaggaaggaaggcaggcaggcaagcgactaggatgttcttagcagggaataacatgttctgtgttttgcaaaagccctatgcatacaaggatcttctgagaaggtgactgggacaccaaggaggaggcgccttcagtcattcagctgatccctgggctgggatcaaaaggatagagagaggtggatggctccaggggcattgagaaggaaaggacttgtgaatcggtgtgcaaaacagatatgaaccagttgaaagttcgtgatggaagaaacatgtctatacaagtgaagtgacgaatctgccttctcaagttaaacccttcaaggaggatccggtgggcagacacatcatttatttttcttttctttgagacaaggtcttgctctgttgcccaggctgcagtgcagtggcacaaacacagctcactgcagcctcgaactcctgggctcaagggagcctcccacctctgccaagtagctgggactaaggcgccaccacgcttggctattttttttttttttgagacagactctcgctctgtcacccaggctggagtgcagtgacgtgatcttggctcactgcaacctccacctcccaggtttaagcaattattgtgcctcagcctcctgagcagctgggattacagacagctgtcaccacgcctggttaatttttgtatttttagtaaagacggggtttcaccacgttggccaggctggtttcgaactcctggcctcaggtgatccatctgcctcagcctcccacagtgctgggattataggcgtgagtcactgcgccctgccgaattttttggatttttagtagagatgaggtctggttgtgtttcccaggctggccttaaactcctgagtgcaagtgatcctcccacctttgccaagtggctgggactaaggtgccaccatgcttggctagtctttttgatttttagtgagatgagatctggctatgctgcccaggctggtcttgaactcctgagctcaagcaatcctctcgccttagcttttcgaagtgctggcattacaggtgtgagccaccatgcctggccccatttcttgtttgctgtggtttccttacattttggagcagtactgggcacatagtgggtgatcaatgaatgtttgtgggatcaatgtatgaatgacttaaatcaaaattgaagaaatcggggacccgggaggctgaggcaagaggaaattggggaactgggaggctgaggtgagaggatcacttgagctcaggagttcaagaccagcctggacaacatggccagatctcatatctactaaaaataaaaaagattagccaagtatggtggcagaccctgggggtgtgtgtgggcatggagggggcggtggtcggggtcttgagttcttggtgctcagggttaggggcggatggcaggtggaggcttacctatcagtcataggaggaggtgagatttctaacaacagctttgaggtagtgagctccccatctctgggactgtgtaaatgggaaaagcacttgtccagagagttgtagaggaaaattctgccccagggaaggtctggagctgagggaacagggaacctcagtctgctctaaatgaggattcattgggtttcccaggagcccaggggtgacagggtttctgcatctccctcacttcctgtggtatctgagactcagcctgtctcacataccttctgtgccttgtggctggagcttggagtgggtctcacttggggtctgggtgtctggcttgctccaggcatcaacgttctgaattccatgcccttgagcttggaggtgctgccccctggtgtggaggagaagaaatgtctcctcaacaccccatgacctcctggtaggggattctgtgcattctataggttgagtctaccttggggagagcccggctgggtcagagcgggtccaaccctgaatatttgtgatctggagatcttggcctgtcagtgggggccccccacccctgagctgaggatctcacactaacccagggtgagcctggagccacagcctactctccaggacacagtgggacagggtgggtggggagtttctcacggctgacttggagggtaggggaggtcgcctcactgctccacagataaatgcatttccactctggaaaattccatccataagcatggttcttgcaggtgagtcagacggagaggaagagagagagagagagagagagagagagagagagagagagaggcaggtagagacagagacacacacgctggtttagggagaaagaaacacatcaagtgaggccaggtgtggtggctcacgcctggaatcccagcactttgggaggcaggggtggatggatcgcttgagcccaggaattggagaccagcctgagcaacatggtgaaaccccatctctactaaaaatacaaaaaattagccagatgtggtggcatgcacctgcagtcccagctattcgggaggctgaggtgggaggatcacctgagctgggggaggctgaggctgcagcgagtcatgatcatgcggctgcactccagatggggtgacagagcgagaccctgtctcaaaaacaaacaaacaaacaaacaaacaaacaaacaaacaaacacagcaactgagcacaaaactcctgaaaagttagcaatgcacagaaagacacagcaggagcctacagatcctgtgagtgatgctccttaaatagtgactggctgaaagaatgaatgaatgagtgaatgaatgatttcttgggctgagcaaaaagaggacttgacacagacatggataacctccagcagctcctgtctactgtgttgataaactgggggttgtgtccagactgctggctggaggtccggatgtccttcaggctgggctagggggcatgaagacagagggtcctacctccagaggggacccaggacgctcgccatcctgagaggctggattccccctcccgaccctggcagggacagggtggggtgggagaggcctcctcgagcatcctcagtgcacaacccagagaaagctcatgggactgagaggaacaggctgagagatggacttttaatggaatggagggagatggggatgcatagcctgggacacatgggccctgggtgcctgtgctggggcgagtgagagagccagtgtccaggtgaagctccttgcctggggcatctgccccatgactgcagtggactgggaagcccttaagagtatcactacccactgatgtccaagtcttgcttgatagtatggtgtccagggaatggtcttggggagtgggttccggagagcctgtgagagttccagggcggggtgcacatcatggggtgcctgggagggtatctttgggagagtctgtggaggagggagttgggaggtgttggaacacagaggagggcctagggtctagtggggtcgttataggatgctcatggggacctgagcatgacatttgggaggctggctctttcctgggaggagctgggggctgaggaagagggtcaggaagtgtcctgtgagagagaacatttgggagtatttcgggcggagacacagtgcaagaaagtggtcttagagcaacaggggtccaccctggggtttcgggggtggatctcagaatgatgtgttttgggaagatggatgggggatgggtgatgggaccacctggtcagtggaggtggggccaggggaggtctgggggaaaaatcctgaggggaggggagagttctgcagggatgatggatgccaggggcatcccatggtgggaccattgtaggagaaacccttgaaagtcagaattcaggtctctgtgatggatctggggggtcagcacttgtggggggcatcctaggggaaaccaatgaagaggtggatttggggtgctgagaaccaggggtatcttgacaagtggaatcttgacaagtggaatttaagagtgtgtttggggggattagaaataaggggaagattatgggggtgcacccaggggttggagcactcacgggaagattctgggaggaggttggagcattccggggtagagactgggttggggggtccctgaggagcatactaaggggggtggcagtttggagggtttggagcccaggggtattttgggatgctatatcaaaagcaatagataatggggtgagattagggagtcagtatttgaggatgtcttgggcacatagtgggtaattaatgaatgtatgtgggatcaatgcatgaatcacttaaactagaaatggaaggaattgggtatgtggcttgggtatgtggcagaccctaggggtgtgtgtgggcatggggtgggtggtcagaggctttcatgttcttcatgtttggggttgggggcaggtgccaggtggaggcttatctatgactcataggaggaggtgatatttctaacaatagccttgaggtagtgaactccccatctctgggagtgtgtaaatgggaagggcacttgtcagaggtggtctggggagggggtgtcccaacccaagggtgcctggggaggggcacagatcacaggaggatgggttgacaggattagaacttagtggtctgttgggagttattcatggggaaggtgggtttagggggtcaggattggggtgtctcagggcatgcatcacaggaggtgagttaggtcagcctgtggggcgaggtgcccaggagtggatggggcaggccctggaggaaggacaggacagagccggctgtagcagaggctttactgcccccacgccctccccagctctgccctggtcagtagcatttgcggtacacgatatagggaccctgttcctcgtactgctcccgcaggacccagcaggactggaaggcgcgcagggaggccaggatggagcccccgatccatacggagaaattcctggtgggctgggcagccaccaccacgtgggtctcggctggcagagcgcgcagcagctctgcccggaagcgaccctcgaagccggtgaagagcgaggacccaccgcagagaagcacgttttgggccaagtccgcgcgcatctccagtgacaacttgcggagactctgcttggccatggtggagaggccgacgggtgacagccccgggacctctggggggttgaacagcagctccggacactggaacagctccttgcccagggtgaccgtgcgcccatcgggcagcttcagagtccgcttgtactcctgctccggccgggcctgctccttctggaagtcggaggccacgtagcaatagtggtgcttaatgttctccactaggtccaggtcctgctgtcccaggggcaggccggcctggagcagcatctccgccaggaaggcggtcaggttgttgcccgccaggtccagacgctccgtggcgtggagcaggttgtagccctggaagacgggcactgtgtaggtgaccccgtgtcccgtgtccaccaccagcccgctgacacgaccgtgggcgtagacagacagcaccgactgcgatgccacgtacatggctggggagcgcagcgactcgaaggccacctccactagcttctcgcggttggtggccgggctgaagggtgggtcggagaacagcagcgggtggtcgtgggtggccactcggaggtcgtgctccagcaggtggcgccagatgagctcggcggcatcccagtccacgacgatgccgctgcgcaggggttgcaccagcgtcagctctgggagcacgcgggctgcctcgccgatgaacgtctgcagcccggactgccccgaggtggcgggtttcttgggctggcagcccaggatggtggccacggtgtaggtggggctggcctgcccagcaaaacctaccttacaggtgcctgtgcccatgtcaataaccaccgcgccggtctttggtggcagcctgtcggccaccatgccgggggagtcccgctgcaggggcttgttcaccacgttgggactggggtttgggccgggcctgggggcctccagggaggactgggattccgaggacttggggcgacttgcatccatggttgcgggacgccaggtgagggggcttttcctctggggttggggttgcggggagaagaggttgaggcccggccagtggggagggcaggcagacagggggaggggtgggcccgcaatctatgacgtcacggtgccccttcagtcttcttaagacatcacaatgcagccaagaggatgggtccctgcccagccctgcctgcccaaaggctgtcatctcttctctgaagagccaaatttggaggaggagatgagcatctcagagcagggccctcttaacacatttctgtcggatgcgctagaagctaatacgatggcacctggtttttgagaaaagacaagctttttgttgcatgtcaacccactgggagctaggaatccagcacaagtctgtttctcagctggctttaaggcagtaattttattagaaaagttctggggccgggggctgtggctcacacctgtaatcccagcactttgggagaccgaggtgggagatcacctgaggtcaggagttcgagaccagcctggccaacatggtgaaacccgtctctaccaaaaaatacaaaaattagcctggcatggtggcgcatgcctgtggtcccagctactggggaggctgaggcaggagaatcacttgaacccaggaggtggaggttgaagtgaaccaagatcatgccaccgcactccaggctgggggatggagtgagactctgtctcaaaagaaaaagaaaataaaagaaaaaaaattagccaggcatggtggcacatgcctgtagtcccagctactagggaggctgaggcaggagaatctcttgaacccgggaggtggaggttgcagcgagccaagatcatgctactgcactccagcctgtatgacagagcgagactcatctcaaaacaaacaaacaaacaaacaaagaaacaaacaaaaaaccctcataagtggaaggcatttcagcaagttgtttcttttttgatctgccattctgcaagctcaaacatttctttggggcatggtttcactaaaaacatgcaaaattggtttctctaactctttgggccacgctttcaggaagacccaggaatcctcctctgggtacctcgccatgaagctatttacagcctagtggcagagagcttgccacaggcctccctagaatattagaatattcctcctcagaatattaattagaaggtggggcgggctagcatggcttcctggtttccaaatggagacagaggccagccttggttggggatggagagaggcagggagagacaggaacacccctgtcctagattctttgcttcctctgctatattcactgcctgaatcattctccctgtcccattcctgccaagaaggaatttgcctcttcaaatctcagtctgatgccacctcctcctggaagccaaccctgatttctactctgtactccaactagatgagggatgggggaagtctgccttctctccaggggttgttacctgcttcctcctggcaggagaggggctcagtgagatacaagaaggggtttcagtatagataaaaggggagagggtgcatttgggaggaaggaattatctcaacaataaatagcaggcttcaaaatgcattaggagagttgcttcaagaccatggctgtttttggtgatatcagatatcacctgttagttaaagcaaataaaaacgtttttcttagtgtatgttcatgcatgtggtggtagaaatcaccaggaatagtgctagtgaatgtcttatgggatatctaaatgaaagaggtttaattttctagttgtgtctagatttattactctgccagagtgtggtttattgagcattttaattaattattgatttactggtatgtgtggtctaatccatgcttttggaaatatttactcagcaatttattgagggtctgttttttggactgttcacaacaaccagaaatacactaagtgataacactttattgttttcaatttttttttgagactgggtcttgctatattgtccaggctggagtgtagtggtgcaatcactgctcactgcagcctccttaacctcgtggtctcaagcaatcctcccacttcagcctccaaagtagctgggactataggcatgtgctactatctccggataagtttttaattttttgtagaaatggggtcttgctatgttgcccaggctgatcttgagctcctgggctcaagtgatcctcctgtcttaacctcccaaagtgctgggatgacagggattagccaccatgcctggcctttcttcattttctgattttaaaacatggcaacttcttatggcaactttatgacttaggaatgggtactatgtctatttttttgatggaaaagaagctcagagaggtcaagtgattgttcaaagtcacaactggtatgagacagaggcaggagttgagcctacatctttgacttacttcagtggctgactgtgagtctgggaaattgtgaaatctaagatccacccaaaacagccaggcatggtggctcacatctgtagtccgagatactagggatgctgaggtgggaggatcacctgagcccaggagttggaggctgcagtgagccaagatcacaccactgcacccagcctgggtgacagagcgagaccctgtctcaaggaacaaacaaacaaacaaacatacaaacaaacaagaaaaacccactaaaaatagaacagaaacaaaggttgggactctgtgagcctccatttcctctcttcttggataaaatgaggataccttgtctggcacttaatagatgctagcttctgagatactgaagcaacaatataggaaaatatcgtgattataggcaacaaagccatgatgtgcctaaggccacagatccggggccaggcttctggaatttaagccctgactcctctgcttaatagctgaggcaaactactaactgtgactcagtatccccatttgcaaaatgggagtaataatagtgccaccttcaaagtgcagctatgaggatgggcaagttattgttttctagtgtttaggtcagtggttcacacatagtaagtgctatgtgagggtttgttacatcaatgataagtactggctggacgcggtggctcacgcctgtaatcccagcactttgggaggctgtggtgggtggatcacctggaggtcaggagttggagatcagtctgaccaacatggagaaaccccgtctctactaaaaacacaaaaattagctgggcgtggtggcacatgcctgtaatcccggctactcgggaggctgaggcaggataattgcttgaacccgggaggcggaggttgcagtgagctgagatcgcgccactgcactccagcctgggcgacagagcgagattctgtctcaaaaaaaaaaaaacaaaaaaccaaaaaaacttcctaggtcagcctgctgtgcctttagtgccgagaaccactgatttcttgagcagtcttgtcacaaaccctggagaacaaaaaggaatgctgtattcatcgtctttttattctgtcctttctaggcaaaagaaatgctgtattcaccgtctttttattctgttctttcgaggctggggcattttggagccttgctgagcctgcagagactgctcctcctgactacccaacgcttagagatagtcaataatttgtttgcaacttcaggtttcctgtgcaaacaaacaaatccagagcccatactccccagccacctccttgtcaggctcttgcactccagcccactctcctcttgccccagtcaccccagataaccaggaacagctcccacaccccagagcctactgaaatgattcatattagccaattctaagcctgctcaccctgccttgcctgttccttcctggggaaaccacaataaaatctcttgcccacagtttctctcactccctttgcttcctgaccacccatggtgctttccccatgtcccgcccccgccacccaccccccacgcactgcccccggccctatggcatggtgtgcctcctcctcttagaaactgtagtaagttatctttcaattgcaatcatctcccaatctcttggccttgccatatgtgcataataataaaacctacatttaattttttttttttaagacagagtctctcccgtcacccaggctggagtgcagtggcatgatctcggctcactgcaacttctgcatcctggattcaagcaattctcatgcctcagcctcccaagtagctgagattacaggcacccgccaccatgcccagctaattatcatatttttggtagagataggatttctccatgttggccaggctggtctcgaactcctgacctcaggtgatctgcccacctcagcccccaaagtgctgggattacagacacacgccaccacgcccagcctaagttttgtatttttagtagagacagggtttctccatgttggccaggctggtctcgaactcctggcctcaagtgatccacctgccttggcctcctaaagtgctgggattacaggcatgagccaccgcaccccgccaaaacctacatttaaaacagaaggcttcactcattcttcttacttgaaatgctcagggatgtttaattatccaacacttcttggatgttcttggcaaacctccttccttcattcctgcagttaattaaaaccgaacctaacagttttttcatgctctcctggggccaattttagatatagagcacgtgactcccactgcaattaatttttttctctgcagttgaaacgggaggctggaagaggatttgaatgtaacgcctttatcccttgacagtagctcaatactgcttgagtgaagatggtgttagtgggttaagcacttggaaacagttcttatctcagacaggcaaccaaaagcccccgtcctttatgccttccagctactgttttgtctaggtttacaaaagtgattttaggccgggcgcagtggctcatgcctgtaatcccagcattttgggaggctgaggcaggcagatcatttgaggtcaggagttcgagaccagcctgaccaacatggtgaaacccccgtctctactaaaaatacaaaaaaattagctggatgtggtggtgcctgcctgtagtcccagctactccagaggttgaggcaggagaatggcttgaacccgggaggtgaaggttgcagtgagctgagatcgtgccagtgcactacagcctgggcaacagagtgagactctgtctcgaataaaacacacacacacacacaaaacaaacaacaaaaaaagcgattttatcctggtgttccctgaaagggctaaatatgcaaagtgggccccgaatgctgaaagacctgagaaccaaagaatgaggcagacaaatccagtctgtaggtaaagattgtttgattgggggaaattacagacagaagtgtggtcttgcgcggctgcaagacaggtaggtctctgcactgttactcctcagacccaaggcttatataccatagggaaagactatatttgctcaagcaagacaaagaaaggcagccctccaaaaaaggcaggagaactacatgcatcataacttataatttgtgctatagtgacatcaaagttgacatgttcttacactaaggacagtattaaataaagttctgatgggtgtctctcactgagtatgctcatgggtatgccttggtgggctcagaacaaggtcaggaaagacatgtgacttttacttttgtgcaaaaaaacaggatacgtaggactgtgcaatgctggaggctgtcttcccagcctacggatcaaatacctgggaatttcactgtatcactctttttttctttttttttgtttttgagatagagtctcactctgtcacccaggctggagtgcagtggcaccatcttggttcactgcaatgtctgcctcccgggttcaagcgatgatcatgcctcagcctcccgagtaactggattacaggcacctgccagcacgcctggctaatttttgtatttttagtagagaacgggtttcatcatgttgaccaggctggtctcgaactcctgacctcaggtgatccgcgcccagccttcatagtatctctcaatcttaagtccacagcagtgtgtattttggggaaaggcagggattcagacgtgatacagacagttccaccctcatgtgtgtgtcctcccatcacctgtgttcaggtgttattggtatcagcagtgagttttggatagttgtgttggtgagagactgaatctgtttcctccccaaagcagcattctcggttggtgtgtggaagttgcagataccaggtgtggagacaaaagtgattccatctcggatgataatctgctgggttgacttctgattagcctcagttccatgaatgcctcctgctccctaccttatttatttatttattttgagaaggaatcttgctcttgtcactcaggctggagtgcaatggcacaatcctggctcactgcaacctccgcctcccgggttcaagcgattctcctgcctcagccaccagagcagctgggattacaggcgcccgccaccacatctggctaatttttgtatttttagtagagatggggtttcgccatgttggccaggctggtctcaaactcctggcctcaagtgatccacctgcctcggcttcccaaagtgttgggattacaggcatgagtcaccgtgccctgcctctactttatttaatactgtctttagtgtaagaacatgtcaaccttgatgtcactatagcacaaattataagctatgactcatgtagttctcttgccttttttggagggctgcctttttttgtcttgcttgagcagatataccctttctctatggtatataagccttgggcctggggagtaacagtgcagagatctacctgtcttgtggcctcccaagaccatgcttctgtctgtaatttcccccaatcaaacaatctttacctacagactggatttgtctgcctcattctttggttctcaggtctttcagcatttggggtccactttgcatatttagccctttcagggaacaccaggataaaatcacttttgttagacacagaaaaaatagggcccggaagacaccaaggaggagggcttgtggttgcatgtctgagataagaactgtttccaagaatttctaaaaaccccacaagaaatttcttcctgttcttcacacatcacctgcattgcagacttgcatgttttacacgtgtgcttatgtttctatgacaagatttatcaccaggcattctttaggagtgcagtaattcagagaaggtgctcttggaaggacgtttgcccggtaatagcatctccactaacgaactgatgacaactctggctttgagcctctggaaccaatgaactctgtttccaagcagtttacaagaacttctccctttttgcctataagacctttcctttacccttccctcactggatgcactcatgctttgccatttggtgaatcctggattagaatcttcttttcctgctcctgaataaattcaacatatttggagatagttttcatgcatatatatgtatagacataaccttggtatatatatgtatagacataaccttggtatatatatgtatagatataaccttggtatatatatgtatagatataaccttggtatatatgtatagatataaccttattatctatacatatatctgaaaactctatataaaataaattatatgtgagaaactatatataactgtatatattatattatatattatatataatgtatatagttctgtatatattgtatatataatatatgtagttctatatataatatataatatgtattataacatatataatatgtattataacatatattatgtattataacatatattatatattataacatatataatatacaatatataatatatgttataatatataatatatgttataatatattatatataatatatacagaactttatatattatatacaatatataatataatatacacagttatatatagcttctcacatatataaccatgtaactatatattatatataatgtattatataatgtaattatgtaatgtacattataatatatagtacatatataatgtaactatataataattatatataatatatagttgcatggttatgtatgtgagaaactatatatatgtgagaaactatatataatgtatattatatattatatatgatataataattttatataatataatataattttatattatataatatataagatatataataatatatataattatataatatataatacatataattatataatatatttttatattatataatatataatacatataatatataatatattttatattatatattatataatatatataatatattatataatatataatatatataatatattatataatatattatataatatatttttatattatataatatataatataatatataacatatataatatataatatataacatataacatatataatatataatatatagttctaaatatagttgtatataatatataatataatatatagttctaaatataattacatattatatataatatatagtataatatatacagttatatatagtttctcacatatagtttgttttatatagagttttcatatatatagataataaggttatatctatacatacataacaaggttatatctatacatatatatacatgaaaactatctccaaatatgttgaatatagttatatatagtttgtcacatatatatgagaaactatacattatgtataaatatatagctgtaaatatatcatatatgttatgtaatattatatatattattatatattatgttcttatatatgtacatataatatgatatatacagttacatataatatatatgagaaactatattacattatatataatatatagttacatggttatttatatagtttctcatatatagtttacttttatatatagttttcatatacatgtttagatataaccatttatagtttcttatataaactatgtatatatataaggttatatctatacatacatatatatatgcaaaaagtatctccaaatatgttgaatttgttcaggaatggaaaaagaggattataatccagcatgtctatttatatatcttatatctgtatatgagaaactatatatatatgtatatgagaaaaataatatatatttatgtacatgaaacatgatatatatttgaaatatgatacatgatatatattttttattattatacttcaagttctagggtacatgtgcacaacgtgcaggtttgttacatgtgtatacatgtgccatgttggtgtggtgcacccattaactcgtcatttataccaggtatatctgccagtgctatccctctccccttcccccaccccatgacaggccctggtgtgtggtgctccccaccctgtgtccaagtgttctcattgttcagttcccacctatgagtgagaacatgacgtgtttggttttctgtccttgagatagtttgctcagaatgatggttgccagcttcatccatgtccctacgaaggacatgaactcatcctttcttatggctgcatagtattccatggtgtatatgtgccacattttcttaatccagtctatcattgatggacatttgggttggtaccaagtctttgctattgtgaatagtgccgcaataaacatacgtgtgcatgtgtctttacagcagcatgatttataatcctttgggtatatacccagcaatgggatggctgggtcaaatggtatttctagttctagatccttgaggaatcgccacactgacttccacaatgattgaactagtttacagtcccaccaacagtgtaaaagcgttcctatttctccacatcctctccagaccctgttgtttcctgactttttaatgatcgccgttctaactggtgtgtgagatggtatctcattgtggttttgatttgcatttctctgatggccagtgatgatgagcattttttcatgtgtctgttggctgcataaatgtattcttttgagaagtgtctgctcatatcctttgcccactttttgatggggttgtttgtttttttcttgtaaattcgtttaagttctttgtagcttctggatattagccctttgtcagatgggtacattgcaaaaattttctcccattctgtaggttgcctgttcactctgatggtagtttcttttgctgtgcagaagctgtttagtttaattagatcccatttctcaattttggcttttgttgccattgcttttggtgttttagtcatgaagtccttgcccatgcctatgtcctgaatggtattgcttaggttttcttctagggtttttatggttttagttgtgacatttaagtctttactccatcttgaattaatttttgtgtaaggaagggatccagtttcagctttctacatatggctagccagtttatatatatatatcactttaatataaataatatattttatatacatgaaatattatatatatttgatatatgatacatgatatatatttgatatgagattatttacatatatgagaaatgatatatatttatatttaatgtataagcttatgtgtttatatttatataacaatacaaatatatagtataaatatgtattgaatatattcttaaatatagtcttatttctcatacatatgagaaactctatctatctatctatctatctataaggttatatatatatataaagttgcaaagtgttaaagaacagagcatggggatccattcttggttaggtcatcgtcatggagaaataactgaatcaccttgaccattagccttcttttgacctcttctttcactagagtgttaggatttgggcattgttaggttattcggagccctggtttgaattcctaaatcccagaattgtgtttcccactaagcaggggttggaccatctgtatacggagccattaaccacacacaacagccagggatggtgagagagccccagctttcctcactctgttgaaggaagcatgtcttggagttgttcatctcttctgcacttttgcttctctttccatgacttgatatctgcctttaataggttcctgcgctttcaggttaaatgcccattccttggacttaacccaaggatatattggctgctttggcctgatgctcagcactgccaggtatgaacagcaccgtgggtgacattggaaagcagcagaggctttctcagccctgagataaacttcagttctgacctgctcgggaaaaggctatgagatgcagcgaaagagaaacatcttcctcaaaagataagctgaagttggccaggtgccgtggctcacgcctgtaatcccagcactttgggaggctaaggcgggcagatcacctgaggtcaggagtttgagactagcctggccaacatggggaaaccccgtctgtactaaaaatacaaaaataagcctggcgtgatgacgcatgcccatagtcccagctactcaggaggctgaggcaggagaatcgctcgaacctgggaggtggaggttgcagtgagctgagatcacgccactgcactccagcctgggagacagagcgagactccgactcaaaaaaaaaaaaaaaagataagctgaagtcaaaaccacagtgagatgagttgccaccttatcctcattaggatgtctactgtaaaaaactcccccaaaccaaaaaaaaccacaagtgttggcaaagatgcggagaaatggaaacccttgtgcatgttggtggaaatagaaaatggtgcaaatatgatggaaaacgtatggtggtttctcaaaaatttaaaaattgaattaccatatgatccagcaattttacttctgggcatatacccaaaagaattggaagtaggatcttaaggagatgtttgtatacctatgttcataacagcgttattcacagtagccaaaatgtggaagaaacccaaaagtccattgatagataaaaggataaacaggcggggcacagtggctcacgcctgtaatcccagcactttgagaggccaaggcgggcagatcacctgaggtcaggagttcgagaccagcctggccaacatggtgaaactcagtctgtactaaaaatacaaaaattagctgggcatggtggtgggcgcctgtaatcccagctacttgggaggctgaggcaggagaatggcttgaacccaggagatggggattgcagtgagccaagattggccgttgcactccagcctgggtgacagagtgagactttctcaaaaaaaaaaaaaaaaaaaaaaggataaagaaatgtgctatacttatacagtgaaatattattcagccttaaaaaggaaggaaattctgctcatgcaaagccatgaataaatcttgaggacatcatgcaaagtgaaataagccagtcacaaaaagtcaaatactgtaggattccacttatacgaggtatctacagtggtcaaactcatagaaacagaaggttgaatagcaggtgccagaggctggagttgcggaggtgaatagggagttatttaacaggtacagagtttcagttttgcaagatggaaaagttccagagatttgtggctcaacaacataagtatagttaacattactgaactgtacatttacaggtggttatgatggtaaattttatgtttgtgtactttactatttgaaaaacaatctgggaaagaagaaaatgttaacaggccagaggcaaggtagaagtggattgcttacaagcctcacagataatgacagtagcagggtacggtggtgtgcacctgtagtcccagctactcaggaagctaaagttgaaggacagcttgattccagcaatttgaatccagactgggcaacatagcaagaccccatctctaaaaaaagatagtaataatatcaaacactgttacagcctcaatgttcccagttactttctaagtgggttacaactgttagcccatttaatctttattctcacattacaggggaggaaaaccaggcacagaggtattaagcagcttgcctggaatctaatagcttatgaagagtagaatcaaattttcaacccaagaagtctgcttccaagtcttcattcttgccaagtatgctacacttccagatacacacaattgcaacataaaccaagttgaacattaatggattctttaaacaaggtcaggtgaatctgtcaggaagagtgtcaggtgggagaaaccaggatggtcttcgctgagaaggtggcattgcaggtagtctttgatggctggccccattttgaaaggtgctggcaatggtggggtgggcgagtggtagaagaagaaggtgtgaaggaagagaaaggaactttattgtgtgtcggtgatattcaaggcccttgaggctgttatttctgcaaatatttatgctttggtgacacaatgggggtgtccaagataaaagacctatagttttcttaaagtatctttttctggttgtagtgtcagggtaattctggctttgtaaaatgagtttggaagtgttcactcctctccattttgtttttttaaataagagtttgagaaggactgacattaattcttctgtacatttgtttggtagaattcatcaataaagccatttggtcctgggcttttctttccttttttttgagatggagtctcgctctgtcgccctggctggagtgcagtggcgtgatcttggctcactgcaagctccgcctcctgggttcatgccattctcctgcctcagcctcctgagtagctgggactacaggcgcctgccaccatgcccggctaattttttttgtatttttggtagagacggggtttcaccgttttagccaggatagtctcgatctcttgactttgtgatccacccgcctcggcctcccaaagtgctgggattacaggcgtgagccaccgggcccggccaggtcctgggcttttcttggttataaggtttttggttactgattcaatatccttactagtcatatatctattcagattttctgcatcttcatgattcagtcttggcaggtcatgcatttctagaaatgtatcaatttcttctaggttatctaatttgttgttatataattgttcatagtagtctcttatgacactttttatttctgtgacctcagttgtaatgtctcttctttcatttctgattttatttatttgcatcttctatcttttttcttaggtagtctagccaaagatttgccagttttgtccatcttttcaaaaaacaacttttagtttcattaatttttctattgtttttctgttttatttatttctttttttttttttttttttgagacagagtctcactttgtcacacaggctggagtacagtggcacaaccttgcctcactgcaacctccgcctcctgggttcaaaccattcttctgcctcagcctcccgagcaactggcattacaggtgcctgccaccacgcctggctaatttttgtatttttagtagagacggggtttttccatggtggtcaggctggtcttgaactcctgacctcaggtgatctgcctgcctcgacctcccaaagtgctgggattacaggcgtcagccaccatgctcttccaaatttttttttttaaaaccctgggccgcacaacatgaggatgaactgagagcggcggccgtgcctccagccatctctggctgcgtatctaatttatttctgctccaatctccgttatttcctttcttctgctaacttttggcttgtttttctttttctagttctagttccttgaggcttaaagttaggtcatttatttgagattttccctcatttttaatgtagtaatttatcactctaaacttccctcttcgtctgcttttgtcgtatcccataaattttagtattttgtgttttcattttcattgtctcaagatattttctattttcccttttgatttattcttttttgagatggagtttcgctcttgtcgcccaggctggagtgcagtggcatgatctcggctcactgcaacctccctctcctgggttcaagcgattcttatgccccatcctcccaagtagttgggactacaggcacctgccaccacacccagctaacttttttttgtatttagtagagacgtggtttcaccatgttggtcaggctggtctcgaactcctgacctcaggtgatccacccacctcagcctcccaaagtgctgggattacaggcgtgagccacctcactgggccctttttgatttattctttgacccattggttgttcgaaggcatattgtttaacttccacatatttgtgaaatgttcagttttctttctgctactgacttctagtttcattgcattgagattgcaaaggatacttgacaacgatttccaccttcttaaatgtgttacgttgtgttttgtgagataacgtgtgatctatgctggagaacgtctcacatgtacctaagaagaacgtgtatcctgctattgttggagagaatgttctgtatatgtctgttaggtccatttgctctttagtatcgttcaagtgctttgtttccatattgatcttttgtctgaatgttctatccattattgaagatggaatgctgaaattccctactcttattgtgttgctttctatttatcttttcagttctgtcaatgtttgcttcatatatttgggtggtctggtgctgagtgtgtatatatttatacgtattatatcttcttggatgagatgatgcttttatcattatacaatgtccttgatttttgatttaaagtctattttgtctgatgcaagtatggctatctttgctgtgttttggttaccgtttgcatggaatattttttttctatcctttcattttcagcctattgtgtttctttaaagctaaagtgggtctcttgtagacagcaatacttgagtcttaaaaaatatgctcagctactgtatgtcttttggttgaagagtttaatccatttacatttaaagtaactattgatagggaaggactagggcaattttgttcattgttttctgtcttgtagtttttcatctcttttcctctcttgctatctttctttgtatttcattgatttttttttatggtgacatgttttgattttttttctcattttcttttgtgtatctactataagtattttctttgtggctaaaatgaaactcctataaatatatttataacaatctattttaaactgataacttcaatcacatataaaaactctacacttttactccccctagattttgttattgatgttaaaaattcagtcttttctatattgcatattcattaatatatttttgaagttatagtttttaaaaatatttttgtcttaaaacttctatgccagaatgaatagtgatttaaacactactattgtagcattttcacctgatggactctttcagcatttcttgtaaggcagaactagtggtaatgaactccctcagcttttgattatatagaaaagtctttattcagttatgaagggtagctttgccagatataagattcttggttggcattttttcttttaatcctttgactatatcatcttactcccttctgggctgcaagatttctgcagagaaatcctctaatagttttatgcaggttcccttgtatgaaatgagttgcctttctctcactgctttcaaaaatctcttggtctttagcttttgataatttgattatgtgtcttggtgtggatttctttgggtttatcctagttgaagtctattaggctacttggatctggatgtccatttcctgtctcaggtttggaaggtttttagccattatttctttaaagaaactatctgctatttttctctcttttttctaataatctcatgatgtgtatattgttcggcttgacagtgtcacataagtcccttaaggtttcttcactctctttcatttttttttctttttgttcctctgattggatatgttcaaatgacctgattatttcttctgcttgatcaaatctactattgaacccctctattgaattttttagttcagttactatattctttagcaccataaatactatttggttgaaaactgtttaaatctctttattgatattttaattttgttcatgcatcattttcttgagctcatagaacacctttatgatggttattttgaactctttttcaggtaatttacctcaattatttagaatccgtttctggagatttagtttcctttttggggaaccatctttcctttttttaattttatcttattattattacacttttaagttttagggtacatgtgcacaatgtgcaggtttgttacatatgtatacatgtgtcatgttggtgtgctgcacccattaactcgtcatttagcattaggtatatctcctaatgctatccctccccactccccccaccccacaacagtccccaaagtgtgatgttccccttcctgtgtccatgtgttctcattgttcaattcccacctatgggtgagaacatgcggtgtttggttttttgtccttgctatagtttgctgagaatgatggtttccagtttcatccatgtccctacaaaggacaggaactcttcatttttggtggctgcacagtattccacgctgtatatgtgccacattttcttaatccagtctatcgttgttggacatttgggttggttccaagtctttgctattgtgaatagtgccgcaataaacatacatgtgcatgtgtctttatagcagcatgatttataatccttcgggtatatacccagtaatgggatggctgggtcaaatggtatttctagttctagatccctgaggaatcgccacactgacttccacaatggttgaactagtttacagtcccaccaacagtgtaaaagtgttcctatttctccacatcctcttcagcacctgttgtttcctgactttttaatgatcgccattctaactggcgtgagatggtatctcattgtggtttttatttgcatttctctgatggccagcgacgatgagcattttttcatgtgttttttggctgcataaatgtcttcttttgagaagtgtctgctcatatcctttgcccactttttgatggggttgtttgtttttttcttgtaaatttgtttgagttcattgtagattctggatattagccctttgtcagatgagtaggttgtgaaaattttctcccattttgtaggttgcctgttcactctgatggtagtttcttttgctgtgcagaagctctttagtttaattagatcccatttctcaattttggcttttgttgccattgcttttggtgttttagacatgaagtccttgcccatgcctatgtcctgaatgttatcaagctacctgacttcaaactatactacaaggctacagtaaccaaaacagcatggtactggtaccaaaacagagatatagatcaatggaacagaacagagccctcagaaataatgccgcatatctacaaccatctgatctttgacaaacctgacaaaaacaagcaacggggaaaggattccctatttaataaatggtgctgggaaaactggctagccatatgtagaaagctgaaactggatcccttccttacaccttatacaaaaattaattcaaggtggattaaagacttacatgttagacctaaaaccataaaaaccctagaagaaaacctaggcatctttccttttttatttgtgtttcctgacaccatgcatttgagaaaactatgtcttatagtctttacaggctggcttcttacagacagagcgagaacttcaccaatcaatctgactgtctgtagtctgggggcctttcaagccctttctgtggatgcgtcttctctagatgtgtgtgtgtgtaaattctcaatgaaaggtcacaaagatcatacattgtatgatgctgtttgcatgaaatatccagaataggtaaatttatacttagagaaatcagactgatggttgccagaggctgagagggaaggaacggggagtgaatgcttaatggatacagaggtttctttggtgataaaaatgttttcatttttatctagaagctagatagagttgatgattgtacaacatagtgaatgtactaaatgccactgaattatacactttaaaatagctaatttttatgttacgcatatttccttattattaatttatttattttgagatggagtctcactctgtcgcccaggctggagtgcagtggtgcaatcttggctcactgcaacctccgcctcctgggttcaagcgattctcctgcctcagcctcccaagtagctgggattacaggcacccaccatcatgccaggctaatttttgtatttttgtagagaaggggtttcaccatgttggccaggctggtcttgaactcctgacctcaggtgatttgcctgccttggcctcccaaagtgctgggattacaggtgtgagccaccatgcccagcctgtgaatttcatctgaataaaataatgtgtgcgtttatacgtatataaagagataaaacaatgggcaaaagattaacaattgttggagggtatatgggtgttcattcaactcttcttttagtctaaaatattttaagtaaaagttagaaaaacggagagaatacttggtgtttaattttttagccatttccatcattttcagtttatctcttctgaaggcaaaaagtgatagcttataaattgtataatgtcagcataaaagatgaaattaagtcaattctaaaaaaaaaaacaactaaaagtgagtaattttaaaaatataggtatctttctggttaagtttttccagtagaatgccaaatctctcggtgttaatgcacaaagtttataaaatgtgtgtttctttgaatataatgttctctggcctatggttttatgggaaacgtttatatttacatctaaataaatacaagattgttttttgagagagagtctcactctgtcacctgggctggaggcagcaatcatagctcactgcaatcttaaactcctgggctcaagcaatctttgcctcccaataaatacaagattttacgtaaaatgacatgaagaaaaagtgtcccaagtgataacaaaagagagtgtgtgtctcagatattgctggtcctaagacatgttatcataatgtcacactcagtgtgaagcattctttttttttttgagttggagtctccctctgtcacccagcctggagcgcagtggcgtgatcttagctcactgcaacttttttgtcccaagttcaagcgattctcctgtctcagcctcccgagtagctgggattacaggtgcacaccaccacacccagctaatttttgtatttttagtagagacagggtttcaccatgttggccaggctggtctcgaacttttgacttcaaatgatccaccctgccttggcctcccaaagtgctgggattgcaggggtgagccaccactcctggcccagtgtgaagcattctatactgttgtgctcttgtcctgagtttatttccccaaggctttctatattttggcaaaagcaaaggttaatgttctgcaatgagtttcccaaaagctgagagagtgaaagaaaatcttggaaaaggaagccatgaagagaaatatgacctcatatcaaactaaccatttcatttttttggttaacaggaagcagtattttaaatatttcatatcctaacatgacagtttgttactgattactgatacacaagccttttactagtttcagctatattccaggaaattatttgagacttttgggttgaggtacaatacagccttttcacatttgaaataatggaatatagagtcccagtggacaattttgtgagcatctgcttttcagaaacgtataattgacattaagcaggagttacctctatcaagacaatgaatgtggatggcacacagcaatggcaaaaaatggagctggaattcagaggattaatattaatcctttattactaataataatttattaatatttgaggcacatgtcgagagtattaacatgttttctctgtcatgttttctcttcccttgttctttataatgacatggtgtagtcaaaaacaattttcatggtttgttctatatatttctataccctttcatccatcatcaattcatcctccacccctccatcccttcactcattcctctacctatccatccatccatccatcatccatccctctaaccatttatctatccatccatccatccatccatccatccatccatttatccatccatccatccatccatccatccatccatccatccatttatccatccatccatccatccatccatccatccatccatccatttatccatccatccatccatccatccatccatccatccatccatccattcatttatccatccatccatccatccatccatccatttatccatccatccatccatccatccatccatccatccatccatccatccattcatttatccatccatccatccatccatccatccatccatccatccatccatcattggtgccagtcaatttgtgctaggtgttgagcatccaaatcccactgctcatttctccatatcttgatttctttttctaaactcctgtctgtttcagcccttcctatttagtaaacattaatgtgtccatgtcccttggtcaccagttatacaaaaatgaataattgcaggctcttgccattgaggaactcatggtctatggcagtgccactcaaattgtggtccatgaactgttactgacccttgtgaagaaattaatcttggactaaagcaattctttaacctcagcctcccaagtatctgggaatatgggactacaggtgtgtgccaccatgcccagctaatctttaaaaaatgtttttgtagaggcagggtctctctatgatctatctgtctctggaccattgctttgcctgagtcttggaagcccctcaaggatggaactcagtggaagaaatgtcctgaccagggaatctgcctcttggctgtgccaccaccatcactgccccagtatttaatgcagaaaaaaatctcctggacatcagatttcctttggaacatgagggtccctttgtagtaatggattccctcatctcctttctcttcttagatccaagcaaaaggacttgggtatctgccatatccaattatctgcatcagtgttgcccattttccccatggttaattgagagatgagtaaatgtttttccacaatcctccagggacaatccaagtatcatgggctctaggctcccactgaaactatttttttttcctaacagaaagggagacccagaggggttctgatgcaaaagctgtccctggagcctcgatccccagacaaggatgtctatctttgcatagaccaaggtggcactgattaaacccaagatgctggagcctggggaggtttttttcaggagctgtcttgcaatgaagggagttgacatgctcatggggcattgagagggatccatcactctgtctgcacacagaccttggtgactgggggtgagagtttggaacccagccttgtggagatcttgggggtctgggcataatttagagactagtattagtggcaagatgggcccccagaactgctggtattgtgtttcacaagctcattgggttgagcttgtacaggtatttggatggaaagatgaatttttgtctacctcttggacatttgccaacctgcacgctggatgcatcttaccttgtctgttattgctgctgtgaatccaagcaggctggacctctagatagcagaaggtcacccatgttgacgttcattccaaaccttccataaaatgtgctggaagcagcaaggggtgggcacctcaccttggccatggggccgggactagaacaacccatctggcatgggctggaagcaccttcagctcactttctggagactgtgaccatcctacaacagtgatgctctggaggaattctcagctcagaattccagggaagatgagttgagtgttaagtccaagaaagagacagtgtccagaatagagacagctcaggatctgaaatcaaactgggttcaaatcccagtctaccctcttcttagctgtgtgactttaggtaagtcacttaccctctctgagtccatttgtctttaactttagttccaacaatcattatttcccttgcaggacgtattcatttaacaactatttactgagcaggctctgctgtggatccttgagatgtgagaatgtgagaaataaataaataatataagtgaattaaattattttattaagtaaattatattatatattaaattaaataatataagtgaatataatataagagaatgtgagaatttaataaataatataagtgacagtttgtcctgcaaactgtcatgtgatcatttggctactaaagtgaccaagagtccagatcatgcctggtcataacggactgatgtgagttttattggcaacaagaagataaataatgtagctcctttcttctggtcactcagtgtcagcaaagggaccactctagacccacattttggcatccctgaggaaaacgggaaagggacaggtaaaaccacaactttaaaacttttcaaagggactctcctcccacccaaagaaggactgatttaggaatcactgtgagatgttccagcccagattagagtaagtcatggctactttttccagctctgcctgtctgactgtggggcagcaggtgagagaggttggatgggtggaacatttttttctgaaagagatttcagtgggaaacagtgtgccaaaagctcaggacataatcccagcactttgtgaggccaagatggggaggtattatttaaaactgggattaagggaccagcctgggaaacatagcaagaccgcatctctacaaaaaaattaaaaaataaaaattagtcaggtgtggtggtgcacacctggagtcccagctactcgggaggctgaggcaagaagatggcttgagcccaggagttgaaggctgcagtgagctatgattgtgctactgtactccagcctgggtgacagagtgaggctctgttccctctaccaaaaaaagctcaggacacaaaggcattacaatggaattagaggaactgctagagatccccaaaaccaggggtttttatttttttcagatgcatcaaagacagtgggaccacctgggcaccctgaaaggaaaggtgagtttgggggcacacaggagtgttgcctgggtttctgcctgcaatcatgttttatgtcttactcttgggtggattctgttatccaccagtccatacagtccggatgctctattacttctgcctggaataaacttccctcctctagctctctggaaaccttccctcctctacctgaccttcaaaacttccatgcctccttctctgtgaagccttccctgatcccatcccaggcagagtttcatcccctgggtacccaaatcatcatgcatgtatttttattacattgctcatcagactatgctgaaatgagttgcacaatgttcatgttctctctcaaactctaaattctataactgcagggctaaattatctgactcccgtacatctttggttgactctggaaaatgccaccaatgaggcactccatttcatttttggttggattttacacatacagtgcgtgtgtgtgtgtgtgtgtcaccagataagggtctgtgaaaacagaagaagaattacagaaaccagtggtggggcgatgacactgttctagacccaaatgtcaacctgtgtggtttcttcccaagagtgctctgcagtttcaaggcaggtcctgcagagttgttggtgcagaagccttccccaccatcccaaagggccacaatgcctgaaaccaggggaaatgccagtcctagaacagttctagggtggaccattggccctgagggttggcaagtgtggcttctctaccagaccagggtgggacatgatcacccattagccagaaatcataacttagtggtgaaggggagtctgtttgtgtgtgtgtgtgtgtgtgtgtgtgtgtgtgtgtgtgtgtgtatgtgtgtgtgtgtgtgtgaagcaaatcttgaatatctattacagtgtttggagatgtgtgaaatgccgatgcaagaacaaggactttggaattaaatctcattttgttagaatcttgacttggttaccttcttgctggttcatcctggacaaggcactgcacttctcagatctctgtcttctcatccccaaaattcatagaggtattaatacctatggtcatttttttttaattgagagagggtctcactctgtgttctgttgcccaggctggagtgcagtggtgtgatcacagctcactgcagcttccacctcctgggctcaagtgagcctcccaccttagcctcccaagtagccgggactataagcatgtgccaccatgcctggctaatttttctatttcttgtagagtcgggatcttgccatgttgctcaggctagtcccaaactcctgggctggtcccagcctcccaaagtgctgagattacagatgtgaaacaccacacccagcctaatagtgtggttattgttattgtcattgtcatcaagggcttgctgaatatttctataacagcttccccagccacctccattcccaccatcctcacttctcttcccaaaaacttagatttgcatttcattctttcattttttccattttcggggctcaggggttgatgaaagacagatgctcgaccaccttcaattatccaccgacagacttctcttcattactgagaatggggtacaaaaagtgtgtccttgggtaggaggtgataggcttagaggagctgcccagctctcagaaagctctccttgcttccaaaacacagctggaggagtgggtgtgaaaactattgcctgggcttctgcctgcaagcctattttatgtcttactcctgggtgcattttcttaaccaccagtccatagagtccagatactgtattatttctgtctggaacaaccttccctcttctagctctctggaaaattcctacctgaccttcaaaactcagctccaatgcctccttctctgtgaaggcttcccagatcccatcccaggcagagtttcatctcctgggtaccaaaaatcatcatgcatgtatttttattaaattgctcatcagactatgctgaaatgagttcaacaatgctcatgttccctgtcaaactctaactctaaattctataactgcagggctaaattgtctaactcccatacatctttgtttttcttttaattttttttgtgttggagtctcgctctgttgtccaggccggaatacagtggaatgatctcggctcactgcaacctctgcctcctgggtttaagcaattctcctgcctcagccttctgagtagctgggattacaggtgcccgccaccacacctggctaatttttgtattttttgtagagacagggtttcaccttgttggctgggctggtcttgaactcccatcctcaaatgatctgcccgcctcagcctcccaaagcattgggattacaggcgtgagccactacgcccagccaaactcccatacatctttgattgactctggaaaaatgctaccaatgaggcactccattccatttttggttagatttcactgttagaaagttctttgctaggttgaaccacacagctgccctcattaacatccaccttccagtagtataaagcaggcaattctactcttcccctcatgaaggtcatcagatagcaaggtcagtgtattagtctattcttgcattgctttaaagaactatctgagatgattgggtaatttataaagaaaatatgtttcactggcgatggttctgtaggctgtacaggacgtataatgacttctgcttctggggaggtctcagggaacttacaatcatggtggaagatgagggagaagcagatgtcttacatggcaggagtagaggcagagggaggtgctacacacttttttttggtgggtggaggagacggagtctcactctgtgcccaggctggaatgcagtggcacggtctcggctcactgcagcctccgcctcctgggttcaagtgattctcctgcctcagcctcccgagtagctgggattacagtcacctgccaccacacctggctaattttttgtatttttagtagagacagggtttcaccgtgttgaccaggctggttgcaaactcctgacctcgtgatcggcccgccttggcctcccaaagtgctgggactacagttgtgagccatcatgcctggctggtgctacacacttttaatgaccagatctcgcaagaactcactcactatcatgaccaagggggatggtactaaaccattcatgagaagccacctccatgatccaatcacctcccagcaggccccacctccaacattaaggattacaattcaacatgagatgtgggtggggacacaggtccaaaccataccaggcagctctcacctgtctcaagaggcttccctgaccacgtcttgtagtgtccttagctattacctacagggcatcctgaccacttcacccctgcacttccccctatcacaaaggtcttgtgcatttatcttcttgttggtcattggtctcctgatggagatggtggagtccagagaaccggggatcttgcctggatgattcacctctgaatgttttatgcccattctagggcatgacacattttgttgaatgcatggatgaatggtagagaggagcttggatggaatgagaaaaatcaggatggcgtataactaaagacagccttgcaggccatcatctgagtgaggaataattccacaggcagcctcatgacaaagagctccagggaggccttcagtagaatctacttgctcttaaatgatcagtcttgctgcttttttctttttttttaaatttaaccccatgcactcttttatttatttatctttttcttaaaattccattttccttttgaaacagggtctcgctcagtctcccaggctgaagtacaatggggtgatcatgcagcctcagcctgctgggctcaagcaatcctcttgcctcagtctcccaagtacctgggatgacaggcttgtatcaccccgcccagctaacttttgtaatttttttgtagagatggaggcaccctatgttgcccaggctggtctcaaactcctgggtgcaagcgatcttcccactgcagcctcccaaagtgctgggattacagacgtgagtcagtgcagccggcctccattgcactcttagtaatgccatgaagcagccactttgggcagctttttgtgttgtctgagagacactcttcctcagcccctggtcacctctgttgaaaactcttcctggctgtctggcatgctgggaatcagctctatttgttttgccctgaagatgtgttttattcataactcactctgactccttagaaaacaattcaataaaaactcagacgagttaatgggtgcagcacaccaacatggcgcatgtatacatatgtaacaaacctgcacgttgtgcacatgtaccctaaaacttaaagtataataataataataaaaaaaaacaactcagttgaggacgggcacagtggctcacgcctgtaatcccagcactttgggaggccaaggcgagctgatcacttgaggtcaggagtttgagaccagcctggccaacatggtgaaaccctgtctctactaaaaatacaaaaattagctgattgtgatggcatgtgcctgtaatccaagctacttgggaggctgaggcaggagaattgcttgaaccggggaggcggaagttgcagtgagccaggatcacgccactgtactcccgcctgggtcacagagcaagactctgtctcaaccaaaacaaaaccaaaccaaacaaaaagaaaacacctcaattgggttgagcagggatgaggatgctatcttccactcaccttgagcaggaatgagaaatagaatcttattttataaaacatacgaataataaaacagccctggtcatatagcccaaagtggataaatactggcgtaaagcaaaagtgctagctcagaccatttctctgagagaaccactcctgtcctctttgctttttcttttcctttttagcatgcttcttaaccatccacagttgggaaagaacattcaccaggtcctgcattttccattgctggagttgtgggcactgcatggtctttcagaataatctggctttgtctgggagcttggaggttgccgaagagaggaagtattcctgatttaagtgtgcagctcttcctggttcttggccatccttcttgttcacctcattcactcaggcaatacttagggacataaaatcttctagagctagtgtctcatagtagtccttgaaattgagtcagactacccacaggccgctgctctcccatccaatgcagtgaagccaccagtaatagctgagctcagcagcaactgcccctccccaggccattcaaccccctcctgctgtcattgtgcctctatggtttcctttctttagatttataccctaaatgtttttcttctgttaaatacgtttgggggtacatatgcaaggtgtgttacatggatatattgcatgatgctgatttgggtttcaattgaaactgtcacccaaattgcgaacatagtacccaataggtagttttttttttatggtgaaaagatatacatatatttagaattagccagctggactcagtttagatgatcccaattttgttggcaacatccaaagcatcataatcaggagccagtcgaacatatgccttcttctcttcatcaggctgaatcagggtgttgaccttggccacatccatgtcatagagctacttcacatgctgtttgatctggtgcttgttggcttcaatgtccacaatgaacgaaagtgtgtcattgtcttctatcttcttgatggtggactcagtggtcagcggcaacgtgatgattgcagagtggccaagcttgtttctcctgggggtgctctttcgaggatatttgggctgcctccggagtcacagtgtcttgggctgctggaaggtgggtgacatgtgggatcttttttttagtggctgtggacacctttcaacactgccttcttggcctttaaagccttcactttggcttcggctttaggaggggcaggagcttccttatttgctttcggcgccatcttgtgaaaagggcccaataggtagttttttaacccttgcttccctctgaagtccccagtgtctgctgttcccctatttatattcctgcgtacccagtgattagcttccactgataagtgagaacatgtggtatttggttttgtttctgccttaattcacttaggataatgggctccagttgcgtccatgtcactgcaatgaacaggtttttttttttttttctaagacaaggtcttgctcggtggcccaggctggagtgcagtgatgtgatcatagctcactgcagcctcgacctcccaggctcaagtgatcctcctgccgtagcctccccagtagctgagactacaggcagtcaccaccaagtcgaactttaaattttttgtagagatggtttttttttttttgacggagttttgctcttgttgcccaggccagagtgcaatggtgcgatctcggctcactgcaacctccgcctcctgggttcaagcgattcttctgcctcagcctcccgaatagatgggattacaggcatatgccaccacgctcagctaattttgtatttttagtagagatggggtttctccatgttggtcaggctggtctcgaactcctgacctcaggtgatccacccgcctcggcctctcaaagtgctgggattatagccatgagccaccatccccgggctccaagatggggtcttgtcatgtcacccaggctggtcttgaactcctgggctgaagtgatcctcctgtcttggcttcttaaggtgctaggattacaggcatgagccactgtgcccagccaattgtattcttttttatggctgcatagcaatccatggtgtctatatactacatttaaaaaaatccagtccaccactgataggcaccccggttgattcaatttctttgttattgtgaatagtgctgtgataaacatgctcatttggtagaatgatttattttccttgggcattccctcaatttgattccagtgctggctcatcacagatttctctttgcttcagattctcatccacgcatttagacccaagcaagcccttctctctgttttcttacttagcttgttgcttcagtttcatcatcccgtttcacctcccagcccttttggtatctgacctcagctttggttaaggacccctgggatgaggggtattgaagcattccaccatctatgtggctgtctttaacttgaaccgcatttttttttttgagatggagtctcgctctgttgcccaggctggagtgcagtggcatgatctcggctcactgcaacctccaccacccgggttcaagcaattctcctgtgtcagcctcctaagtagctgggattacaggcgagtgccaccacacccagctgatttttgtacttttagtagagacgaggtttcaccatattggtcaggctggtctcgaactcctgacctcgtgatccacctgtctcggcctcccaaagtgctgggattacaggcgtgaggcaccacgtccagccgaacctcaaatttttcactatagggagcagtgggtagctcttcattggagtgtggccaagcgtctcattcagagatgccagctgcttctttcccatcccatgccttggatagacactaactgattaagttttctccctccagcctactgattctagctgcagcctcattactcttctcaagacaccatcccaggaagccactaccaatcaatgatgattggcatgtgagatgaaaattatttgccaccccatgcaggcttcttgccatagttcagctgttcttcctgcagctaaagtgcattgtgtaaaacatgggggatgtgaatcagtcggtggcctcagacttcattctggtgggcctcttcagtcactcaggatcacgccagctcctcttctccctggtggctgtcatgtttgtcataggccttctgggcaacaccgttcttctcttcttgatccgtgtggactcccggctccacacacccatgtacttcctgctcagccagctctccctgtttgacattggctgtcccatggtcaccatccccaagatggcatcagactttctgcggggagaaggtgccacctcctatggaggtggtgcagctcaaatattcttcctcacactgatgggtgtggctgagggcgtcctgttggtcctcatgtcttatgaccgttatgttgctgtgtgccagcccctgcagtatcctgtacttatgagacgccaggtatgtctgctgatgatgggctcctcctgggtggtaggtgtgctcaacgcctccatccagacctccatcaccctgcattttccctactgtgcctcccgtattgtggatcacttcttctgtgaggtgccagccctactgaagctctcctgtgcagatacctgtgcctacgagatggcgctgtccacctcaggggtgctgatcctaatgctccctctttccctcatcgccacctcctacggccacgtgttgcaggctgttctaagcatgcgctcagaggaggccagacacaaggctgtcaccacctgctcctcgcacatcacggtagtggggctcttttatggtgccgccgtgttcatgtacatggtgccttgcgcctaccacagtccacagcaggataacgtggtttccctcttctatagccttgtcacccctacactcaacccccttatctacagtctgaggaatccggaggtgtggatggctttggtcaaagtgcttagcagagctggactcaggcaaatgtgctgactacatagaaactgctggtgagattccagcggtcctcgatcccacccaccttcccaaagtatgcatttggcattcaattgccaatttgtgcaactggccaaatatccagccattgcccaaggtgcaactttttgagaaaatgtctgccttttaaattgaggtagaatacacgtaacataaaatgagccactttgaagtgtaaaattcagctgctaagtgcttatgtccaaggctaagtgtctgcccagttcctccctgctcacgccgagttcctccctgctgatgactagctgggttcatgttttccctcatggacttgtggaaagcaatggtaatcatcccaatcacattcagcatattttttttctctctcttttttttctttttgtaacggggtctcactctgtcgcccaggctggaatgctgtgacatggtcatagctcaccgcagactagaactcctaggctcaaggggtcctcctgcctcagcctcttgagtatctgggactacaggcatgtgccaccacgcccagctaattttgttcattttttgtagagatggggtctcatgatgttgcccaggctcgtattgaattcctggactcaagcaatcctcccatctcggcctcccaaagtgctgggattacagatgtgagccattgtgctcagacagtatattatttctgtaacaatgtacccccccccccattttttttgagatggagtctcattctgtcatctaggctggagtgcagtggtacagtctcggctcactgcaacttccacctcccgggttcaagcaatcttcccacctcaacctctcaagtagctgggattacaagcgtgcgccaccatgcctaactaatttttgtatttttagtatggatggggtttcaccatgttgaccaggctggcctcaaactcctgacttcaagtaatctgcccttcttggcctcccaaagtcctgggattacaggtgtgagccaccacatctggccagaaatatcaatatattataaagctaatatttaaacattataaagctaacaaaactctgaagaagtgtcagcaccaaagctggccctgagaagaaaacagaaaataaatcaggtgtaacttagatattttattaaaatatgtatatttacagtgtctactgggtgataagtaaaatatacaaattaattaaaaatatacaaggagctccagtaactcagtaggacaaaatcttttttttttttttttttttttttttttgagacagagtctcattctgttgcccaggctggagtgcagtggctcgatctcggctcacctccacctccacctcccaggttcaagcaattcttctacctcagcctcctgagtagctgggattacaggtgcctgccaccacccctggctaatttgtgtatttttagtagagacggagttacaccatgttggccaggatggtctcgaactcctgacctcatgtgatccgcccacctgggcctcccagagtgctgggattacaggtgtgagccaccacaaatcctcaccctgaagccccacaaattcactccatctcctcacctttcattcaaggtcacagacttgttatctacttcctgtgagacctgctcccaatctgtcctaactcccagctgttcttgttctcaccccgtctacctgtggtggtgtggtggctcatgactatagtcccagcactttgggaggccgagatgggcatatcacttgaggtcaagagttcgagaccagcctggccaacatggcgaaaccccatctctgctaaaaatacaaaagttagctgggtgtggtagcgggcacctgtaatcccagctactcaggaggctgaggcagaagaattgcttgagcccaggaggcggaggttgtagtgagccaagatggcaccactgcactccagcctgggcgacagagtgagaccctgtcttaaaataaaaaaagttataaacatggaatcaccacacaacccaaccattccgctccttggtgtatacccaaaagaagtgtgcttaaacaaattcttgctcatgcatgctcacagcggcctacctctacagccaaaggtggaaaaaacccaaacgtccactaatggaggaatgcataaacagaatcaatataatggaatgttacttggtcataaaaaggaatgaaagactggctgtggtagcttgcacctgtaatcccagcactttgggaggccaaagtaagaggattacttgaggccaggagcttgaaaccagcctgctcaacatagtgaaactccatctctacaaaaagtaaaaaaaaaaaaaaaaagtccaggctgtggtggcacgcacctgtagtcttagctgcttgggagactaaggcaggagaatcacttgagcctggaagcagaggttgcagtgagccaagatcacaccactgcattccagcctgggtgatagagtgagaccctgtcttgcaaaaaaaaaaaaaaaaaaaaaaaaaaaaaagaaaagaaaagcaaaaaagatatctgctaccatgtatataaaccttgaaaatattataataaatgaaagaagcctgacacagtagatagcatgtggtataaattcatttatataaagtatctagaatagttaaatcaatagaaagagaaagcagattgatgatggccggtcgtagtggctcatgcctgtaatcccagcactttgggaggctgaggtgggcggatcacctgaggtcaggggtttgagaccagcctggccaacatggtgaaaccttgtctctcctaaaaataaaaaaatacaaaaattagccgggcgtggtggtgcatgcctgtactcccagctactcaggaatctcaagagaatcaactgaaccgggaggtggaggttaaagtgagtcgagattgcgccattgcactccagcctgggtgacagagccagactctgtcttaaaaaaaaaaaaaagaaagaaagcagattgatggctacatgatcttagaggtgggtgcagaggggaattggggttgattacttaatgggtaagagtctgattttgggtggcaaaaatgacttggaactagagagaggggacagctggggcatcacttcatgaatgtaccagatgctgctgatttgttcactttaaaataattagtgttttattatgtcaattccacctcaataccaaaaattattctcaagtttgatattaggaaaagaaaacttagagcaaaagcaataacacaaagcagtaaatcgatggaggaacatttgtttttagaaccatttctgtcctgaaaacctagtgtgtgataaagatagaatttcaaaacatctcgacaatgatgatttaataagagtcctgtggacaatagattacacatgtgtaaaagaattttgctcgactaacttttgaatttaggaaaactcctcaatatgttagaaatattaatatatcatcaagctaatatttaaacattataaagctaacaaaactctgaggaagcaagaagaaaacaaactaaatcatgggcaacttagatatttgatcaaaatatgcacatttacagggtctatcaggtgataagtaaaatatagaaattaatttaaaatacagaaggagctcaaaaaactcaatagaacacaatctttttttttttttttttttcctgagacagagtctgttgcccagtctggagtgcagtggaacaatctcggctcaccccaacctccacctcccaggttcaagcaattctcctgcgtcagcctcccgagtagctggccctacaggcacctgctaccatgcccggctaatttgtgtatttttagtagagataggatttcaccatattggccaggctggtttcaaatgcctgacctcaggtaatcttcccacctcagcccctcaaagtgctggcattacaggtgtgagacaccgtccttggcccaataggacaaaaatctaataattaataatttgattttgaaaatgggcaaaagacatgaatagattttttttttcaagacagagtctcactctgtcacccagactggagtgcaatggcacgatctcagctcactgcaacctccgcctcccaggttcaagcgattctcctgcctcagcttcccaagtagctgggattacaggcaccagccaccacgcccagctaatttttgtacttttagtagacaaagggtttcatcatgttggccaggctggtctcaaacttctgatctcaggtgatccacccaccttggcctcccaaagtgctgggattacaggcatgagccaccgcgcccggcctctgaatagacgtttttcaaaagaagatatacaaatggcaaacaggcttatgagaaggtactcaacatcactgatcatcagagaaatgcaagtcaaaactgtgaggagatatcatcttaccccagttagcttacatccaaaagacagacaataatacatgctggtaaggatgtggagaaaaaggaacgcttgtacagtgttggttaattcaatcactatggagagcagcaagggccacacagtgagaccctctctcttaaaaaaaattacaaaaacaggcctggtatagtggctcacacctgtaattccagcactttgggaggcctaggcaggcagatcgcctgagctcaggagttcaaaatgagcctgggcaacttggcgaatccgattctctaataaaaatacaaaaattagctgggtgtggtggagcacgcctgtaatcccagttacttgggtggctgaggcacgagaatcgcttgaggctgggatgcagaggttgcagagagtcaagattttaccactgcactccagcctgtgcgccagagtgagactgtgtcaaaaaaaaatggtgaatagaagaataattgaataactgcctcagacatttatacagttctcatctcattctgggcacacggaagatcatgttggcctcatctccttgattttaaaaacagtattctaaaatcaaggagactagatgtatcacttctaggccaaatcatgaaggaaaatgtgtaagagtttcatgtgctcttcatctctgtgatcagaattgaagaaggcatgagtttgagatgctgcatcaccaagatcgtggtgattccattatcattacccttgtaacttgtgagcatccttactgccagcaatcattattagatatcaaatttgagataggagttcatatttactgtatgaatatcttggtctgggagtggtggctcatgcctgtaatcccagtgctttgggaggcagaggaaggaggctcacttgagcccaagagtttgagaccacccaggacaacacagggagaccccatctctacaaaaaatgtaaaaatcagccaagtgtggtggtaggtgcctgcagtcccagcaatttgggaggctgatgtgggaggatcccttgagcctgggatgtcaaggctgcagagagccgagatcatgccactgaacttcagcctgggcaacagagcaagactctctctcaaatacaaaacgctttttcctttaggcttaaattctaaccctcaaacctccaatgtgaaggtattaggaggtggggcccttgggagatgatgaggttgtgaaagtggaaccctcgtaaatgggattagtgcccttctgaaagtggcagaagagagctcgccaacaccttccatgtgaggagacagggaagatatgacagtctccaacctggaagagggtcctcaccagaccctgatcatgctggcaccctcatcttggaattccagcctccagaacagtgataaacaaatgtctgttcttaaaaaaaaaaaactgtggaaagcaatgttaatgttcccaatcacttttggtacattctttccttaactatgtcttaatgcatagttgtgttggatggcctactttgtaatgttagaatatgcatgttagtgaattaacaaatacagcagtaaagaatgctcttcgggttgggaatggtggctcacgcctgtaatcccagcacattggaaggccaaggtaggcagataacctgaagtcgagagttcgagatctgcctgatcaagagaaatccgactctactaaaaatacaaatcagcctgtcacagtgtcgcatgcctttaatcccagctactggggaggctgaggcaggagaatcacttgaacctaggaggcagaggttgtggtgagccaagatcacaccattgcactccagcctgggcaacaaaagccaaactctatctcaaaaaagaaaaaaaaaaaaaaaaagaaatgctgtttgttgaccatttgaatggctagtcttggtgcttcctggtgggtgaggagagccctgccccattcctacccattcaagtagacatggcataagagtgattctcactttctcctatagcctccttatccattggctgaaaagattgttttttaacgtgtcttataaatgcttccatagcaaaaaaaatgaattgacttttatagtgactctttcggggattgttacccataattccgtaatttgtttgaactcctaaaaaagggaagtatgccgagcacaatggagatttcgtctcaaaaataaataaataaataaataaataaataaataaataaataaatagaaaagaaagaaaaggaagtaaagggaaatatacaaatatacaaggtgttatgagagagttgctaattgtgattccctcttaattgtccaaagagaccacctctggggatctattcctaaaagactcgttagaagtgcagactcgctctctccctctccctctccctctcccgtctccccacagtctccctctccctctctttccatggtctccctctgatgccgagccgaagctggactgtactgctgccatctcggctcactgcaacctccctgcctgattctcctgcctcagcctgcggagtgcctgggactgcaggagcgcgctgccacgcctgactggttttcgtatttttttggtggaaatggggttttgctgtgttggccgggctggtctccagctcctaaccgcgagtgatccgccagcctcgcctcccgaggtgcccggattgcagacggagtcttgttcactcagtgctcaatggcgcccaggctggagtgcagtggtgtgatctcagcttgctacaacctccacctcccagctgccagccttggcctcccaaagtgccgagattgcagcctctgcctggccgccaccccgtctggaaagtgaggagcgtctctgcctggccgcccatcgtctgggatgtgaggagcccctctgcccggccgtccagtctggaaagtgaggagcgtctctgcccggccgccatcccatctaggaagtgaggagcgtctctgccaggccgcccatcgtctgagatgtggggagcgcctctgccccgccgccccgtctgggatgtgaggagcgcctctgcccggctgccctgtctgagaagtgaggagcccctctgcctggcagccgccccgtctgagaagggaggagcccctccacccggcagccaccccgtctgggaagtgaggagcatctccgcctggcagccgccccgtccgggagggaggtgggggcgtcagccccccgcccggccagccgccccatccgggagggaggtgggggggtcagccccccgcccggccagccgccccgtccgggaggtgaggggcgcctctgcccggccgcccctactgggaagtgaggagcccctctgcccggccagccgccccgtccaggagggaggtgggggggtcagccccacgcccggccagccgccccgtcagggagggaggtggggggtcagcccaccgcccggccagccgtcccgtccgggagggaggtgggggggtcagcccccgcccggccagccaccccatccgggaggtgaggggcgcctctacccggccagccgccccgtctgggaggtgtacccaacagctcattgagaacgggccatgatgacaatggcggttttgtggaatagaaaagggggaaaggtggggaaaagattgagaaaccggatggttgctgtgtctgtgtagaaagaagtagacttgggagacttttcattttgttctgtactaagaaaaattattctgccttgggatcctgttgatctatgaccttacccccaaccctgtgctctctgaaacatgtgctgtgtccactcagggttaaatggattaagggcggtgcaagatgtgctttgttaaacagatgcttgaaggcaacatgctccttaagagtcatcaccactccctaatctcaagtacccagggaaacaaacactgcggaaggctgcagggtcctctgcctaggaaaactagagacctttgttcacttgtgtatctgctgaccttacctccactattgtcctatgaccctgccaaatccccctctgcgagaaacacccaagaatgatcaataaaaataaaaataaaaaaataaaaaaaagaagggcagactcatgcatttaagaatcactcagggaaatctgaagatgacctgtggtgggggtataaatggattcttaaatgtgtcttgtgattatgtgagagtgtgactgtgtgactgtgtgtgtgtgtgtgtgtgctgtcatctgtggagtgggggatcctcttttgccttgagaaagctcatctctgtccacttactctgggctctaccatctgtgccttgtatccagtagaaataaaacagtttgcggcagaaatggagttttattttattttacttttttattaggattatttgtagaccgggtctcactctgtcgctcaggctggagtgcaatggcacgatctcagatcactgcaacctgtgcctcctgcactgaagccatcctcccacctcagcctctggagtggggagatcccacacctgtgtaatttttgcattttttctagagatggggtttcctcatgctgcccgggctggtttccaacgcctgggctcaagtgatccacccgcctcagcctcccaaagtgctgggattacaggtgggagctactgtgcccggccagagatggagatttttgttcttcttttgatgagacggaacctcgcaccgtggcccaggctggagtgcagtggagtgacctcggctcactgcaagctctgcctcctggggtcatgccattctcctgcctcagcctcccaaagagctgggactacaggcgcccgacaccacgcccagctaaggtttttgcatttattattttttttttttgtagggacgggctttcaccgtgttagccaggacggtctcgatctcctgccctcgtgatgcacccgcctgagcctcccgaagtgctcggattacaggcatgagccaccatgcacggcccagaaatggagatttttgagcaaacacattaaagaaaagaaacgcaaatagacgaaactcattttaacatttttatttaacccaaggaatacagatataatcaacaccaatacaattgatgtcacaatgatgactaagatacatgctacaatccttcattctcagatgcaaaatctagtatgtgttttacagcaaacgtcagttggaaactgaacgtcgatcacacatgcttgatgtgcatgtcaatttcatgagagttacaatctcaggagaagtctcacatagcgtaagagtccaaacataccttcaagtgttttgacaagttcttcactactcattcttagaactgaatttaccaacaacaatcccagcctattcattgctgaactgcatcccattgaaagaatgggtcacagttcctctctctagacactgtggaacgacattgaaggcccttccatcttttggcgattgtgaggacaggtgctagaagcctctgccctcagccttgtccacgtgagttctaattcctttagaacaactatctcagggtgggaaagatggttccaatgctaagtgcctattgcattgattatgaatcaatgaaactctttctccctgggggttgtcccagttggattccaagcagcactgtcagagtgttccagcttctccacatgctccgcagcccttgggatggtgagtgattgtcacggtggcttctgggagagcttcttggttgttgttgaaggtgtatttgacgtgcatttccccaggggagggacagtgaacgctttttgaagtggttctttacatcccctttgaggaaatgtctgctcaagtctctggctgggttttgaacagaatcatttgtttgtcccattggagttttgacaactctgtgtattctgagtatgagcagtccttgcacgtatatgagatttgcaaatattttgtgccccaatctcaaggttgctctttgatacaaatcaagagcatctgaggcagagcaaaggttcaggtgagaggacggagcatttctccacctctccagcatgcgcagcatctctctcctccgagatgccgagacatgtgtgcagggagacaccatgaaaaagcaggtgtgcttcattctgaatagagcgtctctgattcccgtctggtgcctgagggtgcatggcccatgagccttagaagagacgtcttcgggccttgcacgttggcctccatagaaacttgtggcaaattctgggctccggactgggtgatggaggtagaggtctgagggcagaggtgggcaggggctccaggccatggagatccaagtggaattcttcaggcagagcctgtctccagggactaggcttgggcatttgggatgagccctgggggacggccgctctgtagtcaggtttgaggtagaggacacgccaggaagaagggctgactccatgcacaaggtttgctgggggtcccatcaggggcaggaagccttggggagcctcaccctcttctactgaaggcgccacacacacattctctgctctctgggctctcacagatccattttcaatgtcaatctcccagacagtctctgtactagtgagcaggagccagcgggcatgggcagggtacaagagatccttcagggacatcaagagttgctcagggaccaccaggagctgcacattgaggaggctgagtcgcagggctccctgtgggtccagccccaggaactcctgccccaggcgcaggtgcaggaccattcctggttccaagaccgcgatgatcatcttcctctggggaagctgtgggccctgggggagaaaagccgtgggtcagtcattgtcctctgagggtggctcaaacagggagagagcaaggcggggagctgccagtaacttccccaggcataaatgaaaccccgcagggacacccagaattggcacctgtattgacgccccttgggacggtgatttcctgcaagtcccctagggcctggagctcaggcagacctgtctcacccacgcccacctaggtggtgtgaccttacctggggcagctccaggggcagctgtgcagggtggtggggagctggctgtaccggagctggttctgcacctgtggagagagcagagtgtgcaggtgaaagcccttgtcatgcaggatgcccttgagggttcaaggtgcctccgtgagaaagaccaaatacagaagaagccaggtacaggacacccagccacggagctgcaggaggaagctcccgacactctggacagcacagctgctcgcctcatgacgtgacgggacactggcttggtagcaggggactcaggatgaaaaagagaagatgcctcacctggatgaggacccagctcctccactttctggcgttttggggcatttgatggcgtgccgctggagctgtaggacagagagacacagtcagatttcgggcagttccctaacgtccaattccctgaatccccacaaattcactccacttccctgcctttcattcaaggccacagactcgtcatccacttcctgtgagacctgctcccaatctgtcctaactcccagctgttcttgttctcaccccatctacctgagcttccctgggtgaagaaaaggcagggaaggagggtcggtgcccacagggagcagtttaccctttcaggagctcatgcagatgagagttggaaaactctccttgggtgtgaggagctggagaaagatgttgagatcccggagaggtggcacctctgtctacacaggtaacaaaggaatggggtcttaggattcgaatcacagcaggagaagaggaaggaatttgtcgggcatgacggcatgcgcctgtaatcccagcactttgggaggccaaggtcggaggattgcttgagtccaggagtttgagagcagcctgggcaacatggtgaaagctagtctccactaaaaatactaaacattagtgggtcatggtggtgcatgcctgtggtctcacctactcaggaggctcaggtgggaggatcacctgcgactcagaggtggagcccgcagtcagctaaaatcacgccactgcactccagtgtggaccatcggagtgagacgctgtctcaataaaataaatcagtaaataagacaaatagaaaaattaaaaatgaaaaaaggaggaaactgttttatttttcctagtagatcttgaaactctcacatcatgtcctacaatctcccttcttgcagaacacagaacccattccctgtggagctggttgggtggattgaaagtggggctgccctgagatatgtgtgtggttgcgatgtagaagccttcccagcaccctgtgatgacttacgggcacctcacttccctctggccccaaattcaaaacatccaatctcatggcaggttcatgcacccttttcccttcccctctctccaacacacacccacacatcccacaggcaggtcaccccgcaggcgtccccagcacatagcaaagctcacccgctctctcctgcgtggtcgctcttggattcggtgcaggaatcactggggcttcttgggcgccgggaacctttcatggtgaaaatttccagggttctccaagtcagccactgccagtgtttgtctgtctcctgcaaagatttcttcttggctcccgaatcctttagttcctttgagagagtggtgtcagccccaaagctgctcccgaaggcttgggttgtgtagcgacggggctgtggccagcggcaggtggatgaggctctgacaactgagctcttgggggaatcttgtacactgtcagcagggggtggagccaggggatttgtcagcaggaactgatgtgattggctgttcctggtatgacaacgggaggggccctcatggaggattggggcgtaactcaatcgatagatgaccgatcaacagaacctgcctaaccccatcaagagccaacctgtttcctgtcccctcccatcctctaggtcttgcctaataatgatagacactttctgtcatacccaattcatccatcgctgaaatagtttttcatgtgtgccttttatattttcatgcaaaaaaaatatgttaattttcacgggggctatcctggggaatgctatgtacatgaaatgaagtgtcaaaggagcagaagcagaaggaaattcacaagcttctctgagcgtctctgcttgaattcctgccatgtttcctaaacatgttggcttctttcttcctacccaagtaagaaggtgcttcagaagatcaatcttagggcatttgacaaacgctgctgagaatttcaggatgacacgaaggaacctttgattggatttgtggatgtgcctgtgaaagcgtgtgtgtgtgtgtgtgtgtgtgtgtgtgtgtgtgtgtgtgaagccaggatgaagtggctgttcctggggtggagacccttctttctcttgagaatgttcattgctgttgactcattgtgggttttggagatattttctctctttctttcgttctttcagacattttttgctttctccctccctcgatcctaaccaccctccatcccccccctcactccctccctcccgctttccatccttcctccctcccttccctctttccttccttcctgccttcttccattccccttcccctcttccttctgtccttccttcctgtgtgtaaaagaaaaattggtgaatagaagaataattgaataactgcctgagtcacttatacatttctcatctcactctggggacacagaagaccgtgttgtactcatctcctcgattttaaaaacagtcattctaaaatcaaggattctagatgtatcacttctaggcgaaatcttgaaagaaaatgtgtaagagtttcatgtgctcttcatctctatgatcacaattgaagaaggcaggaggttgagatgctgcatcgccaagatcgtggtgattccattatcattacccttgtaacttgtgagcatccttactgccagcaatcattattagatatggaatctgatataggagttcatatttactgtatgaatatcttggtgtgggagtgttggctcatgcctgtaatcccagtgctttgggaggcagaggcgggaggccgaggcaggaggctcgcttgaacccaggagttcgagacaagccggaagagcatggcgagaccctcgtctctacaaaaatgtaaaaatcagccaagtgtgctggtaggtgcctgtagtctcagctccttaggaggctgaagtgttaggatcgctttcgcccgggatgtaatggctacagggagtcgagatcttgccactgaacttcagcctgggcaacagagcaagactctctctcaaaaataaaatgctttttcctttaggcttaaattctaacactcaaacctccaaagcggaggtattaggaggtggggcccttgggagatgatgagattatgaaagtggaaccctcgtaaatgggattagtgcccttctgaaagtgacggaagagagctcgccagcaccttccatgtggggagacagggaggatatgacagtctccaacctggaagagggtcctcaccagaccccgatcatgctggcactctcatcgtggacttccggcctccagaactctgatcaacaaatgtgtgttcttaaagaaaagaaaagtgtggaaagcaatgttaatgttcccaatcactttgagtacattctttccttaactatgtcttaatgcatagttgtgttggatggcctagtttgtaatgttagaatatgcatgttagtgaattaataaatacagcagtaaagaatagagttgtggttgggaatggtgtctcacgcctgtaatcccagcacaatggcatgccgaggcgggtcaatcacctgtagtcgggaggtggagatcaccctgaccaacatggagaattcccgactctactaaaaatacaaatcagcctgtcatagaggcacatgcctttaatcccagctactcgggaggctgaggcaggagaatcacttgaacctaggaggcagaggttgcggtgagccgagatcgcgccattgcactccagcctgggcaacaaaagctaaattctatatcaaaaaattaaaaaaaaaaaaagaaggctgtttgttgaccatttgagtggccagtcctggtgcttcctggtgggcgaggagagccctaccccattcctacccattccagtagtcatggcataagagtgattctcgctttctgctatagcctccttatccattggctgaaatgattgttttttaatgtgtcttataaatgcttccatagcaaaaaaatttgaattgacttttatagggactctttcggggattgttacccatcattccataatttgtttgtactcctagaaaagggaagtatgccgagcacagtggatatttcgtctcaaataataaataaataaccaaatagaaaagaaagaaaaggaagtaaagggaaatatacaaatatacaaggtgttaggagagagttgctaatcgtgattcccccttaattgtccaaacagaccacctctggggatctattcgtaaaagactcgttagaagtgcagactcatgcatttgagaatcactcagggaaatctgaagatgacctgtggtgggggtgtaaatggatacttaaatgtgtcttgtgattgtgtgagagtgtgactgtgtgtttgtgtgtgtgctgtcatctgtggagtgggggatcctcttttgccttgagaaagctcatctctgtccacttactctgggctctaccatctgtgccttgtatccagtagaaataaaacagtttgcggcagaaatggagttttattttattttactttactttttattaggattatttgtagaccgggtctcactctgtcactcaggcgggagtgcaacggcacgatctcagatcactgcaacctgtgcctcctgcactgaagccatcctcccacctcagcctctggagtggggagatcccacacctgtgtaatttttgcattttttctagagatggggtttcctcatgctgcccgggctggtttccaacgcccgggctcaagtgatccacccgcctcagcctcccaaagtgctgggattacaggtgggagctactgtgcccggccagaaatggagatttttgttcttcttttgatgagacggaacctcgcaccgtggcccaggctggagtgcagtggagtgacctcggctcactgcaagctctgcctcctggggtcatgccattctcctgcctcagcctcccaaagagctgggactacaggcgcccgacaccacgcccagctaaggtttttgcattttttttttttttttttgtagggacgggctttcaccgtgttagccaggacggtctcgatctcctgccctcgtgatgcacccgcctgagcctcccgaagtgctcggattacaggcatgagccaccatgcacggcccagaaatggagatttttgagcaaacacattaaagaaaagaaacgcaaatagacgaaactcattttaacatttttatttaacccaaggaatacagatataatcaacaccaatacaattgatgtcacagtgatgactaagatacatgctacaatccttcattctcagatgcaaaatctagtatgtgttttacagcaaacgtcagttggaaactgaacgtcgatcacacatgcttgatgtgcatgtcaatttcatgagagttacaatctcaggagaagtctcacatagcgtaagagtccaaacataccttcaagtgtttcgacaagttcttcactactcattcttagaactgaatttaccaacaacaatcccagcctattcattgctgaactgcatcccattgaaagaatgggtcacagttcctctctctagacactgtggaacgacattgaaggcccctccatcttttggcgattgtgaggacaggtgctagaagcctctgccctcagccttgtccacgtgagttctaattcctttagaacaactatctcagggtgggaaagatggttccaatgctaagtgcctattgcattgattatgaatcaatgaaactctttctccctgggggttgtcccagttggattccaagcagcactgtcagagtgttccagcttctccacatgctccgcagcccttgggatggtgagtgattgtcacggtggcttctgggagagcttcttggttgttgttgaaggtgtatttgacgtgcatttccccaggggagggacagtgaacgctttttgaagtggttctttacatcccctttgaggaaatgtctgctcaagtctctggctgggttttgaacagaatcatttgtttgttccattggagttttgacaactctgtgtattctgagcatgagcagtccttgcacgtatatgagatttgcaaatattttgtgccccaatctcaaggttgctctttgatacaaatcaagagcatctgaggcagagcaaaggttcaggtgagaggacggagcatttctccacctctccagcatgcgcagcatctctctcctccgagatgccgagacatgtgtgcagggagacaccatgaaaaagcaggtgtgcttcattctgaatagagcgtctctgattcccgtctggtgcctgagggtgcatggcccatgagccttagaagagacgtcttcgggccttgcacgttggcctccatagaaacttgtggcaaattctgggctccggactgggtgatggaggtagaggtctgagggcagaggtgggcaggggctccaggccatggagatccaagtggaattcttcaggcagagcctgtctccagggactaggcttgggcatttgggatgagccctgggggacggccgctctgtagtcaggtttgaggtagaggacacgccaggaagaagggctgactccatgcacaaggtttgctgggggtcccatcaggggcaggaagccttggggagcctcaccctcttctactgaaggcgccacacacacattctctgctctctgggctctcacagatccattttcaatgtcaatctcccagacagtctctgtactagtgagcaggagccagcgggcatgggcagggtacaagagatccttcagggacatcaagagttgctcagggaccaccaggagctgcacattgaggaggctgagtcgcagggctccctgtgggtccagccccaggaactcctgccccaggcgcaggtgcaggaccattcctggttccaagaccgcgatgatcatcttcctctggggaagctgtgggccctgggggagaaaagccgtgggtcagtcattgtcctctgagggtggctcaaacagggagagagcaaggcggggagctgccagtaacttccccaggcataaatgaaaccccgcagggacacccagaattggcacctgtattgacgccccttgggacggtgatttcctgcaagtcccctagggcctggagctcaggcagacctgtctcacccacgcccacctaggtggtgtgaccttacctggggcagctccaggggcagctgtgcagggtggtggggagctggctgtaccggagctggttctgcacctgtggagagagcagagtgtgcaggtgaaagcccttgtcatgcaggatgcccttgagggttcaaggtgccaccgtgagaaagaccaaatacagaagaagccaggtacaggacacccagccacggagctgcaggaggaagctcccgacactctggacagcacagctgctcgcctcatgacgtgacgggacactggcttggtagcaggggactcaggatgaaaaagagaagatgcctcacctggatgaggacccagctcctccactttctggcgttttggggcatttgatggcgtgccgctggagctgtaggacagagagacacagtcagatttcgggcagttccctaacgtccaattccctgaatccccacaaattcactccacttccctgcctttcattcaaggccacagactcgtcatccacttcctgtgagacctgctcccaatctgtcctaactcccagctgttcttgttctcaccccatctacctgagcttccctgggtgaagaaaaggcagggaaggagggtcggtgcccacagggagcagtttaccctttcaggagctcacgcagatgagagttggaaaactctccttgggtgtgaggagctggagaaagatgttgagatcccggagaggtggcacctctgtctacacaggtaacaaaggaatggggtcttaggattcgaatcacagcaggagaagaggaaggaatttgtcgggcatgacggcatgcgcctgtaatcccagcactttgggaggccaaggtcagaggattgcttgagtccaggagtttgagagcagcctgggcaacatggtgaaagctagtctccactaaaaatactaaacattagtgggtcatggtggtgcatgcctgtggtctcacctactcaggaggctcaggtgggaggatcacctgcgactcagaggtggagcccgcagtcagctaaaatcacgccactgcactccagtgtggaccatcggagtgagacgctgtctcaataaaataaatcagtaaataagacaaatagaaaaattaaaaatgaaaaaaggaggaaactgttttatttttcctagtagatcttgaaactctcacatcatgtcctacaatctcccttcttgcagaacacagaacccattccctgtggagctggttgggtggattgaaagtggggctgccctgagatatgtgtgtggttgcgatgtagaagccttcccagcaccctgtgatgacttacgggcacctcacttccctctggccccaaattcaaaacatccaatctcatggcaggttcatgcacccttttcccttcccctctctccaacacacacccacacatcccacaggcaggtcaccccgcaggcgtccccagcacatagcaaagctcacccgctctctcctgcgtggtcgctcttggattcggtgcaggaatcactggggcttcttgggcgccgggaacctttcatggtgaaaatttccagggttctccaagtcagccactgccagtgtttgtctgtctcctgcaaagatttcttcttggctcccgaatcctttagttcctttgagagagtggtgtcagccccaaagctgctcccgaaggcttgggttgtgtagcgacggggctgtggccagcggcaggtggatgaggctctgacaactgagctcttgggggaatcttgtacactgtcagcagggggtggagccaggggatttgtcagcaggaactgatgtgattggctgttcctggtatgacaacgggaggggccctcatggaggattggggcgtaactcaatcgatagatgaccgatcaacagaacctgcctaaccccatcaagagccaacctgtttcctgtcccctcccatcctctaggtcttgcctaataatgatagacactttctgtcatacccaattcatccatcgctgaaatagtttttcatgtgtgccttttatattttcatgcaaaaaaaatatgttaattttcacgggggctatcctggggaatgctatgtacatgaaatgaagtgtcaaaggagcagaagcagaaggaaattcacaagcttctctgagcgtctctgcttgaattcctgccatgtttcctaaacatgttggcttctttcttcctacccaagtaagaaggtgcttcagaagatcaatcttagggcatttgacaaacgctgctgagaatttcaggatgacacgaaggaacctttgattggatttgtggatgtgcctgtgaaagcgtgtgtgtgtgtgtgtgtgtgtgtgtgtgtgtgtgtgaagccaggatgaagtggctgttcctggggtggagacccttctttctcttgagaatgttcattgctgttgactcattgtgggttttggagatattttctctctttctttcgttctttcagacattttttgctttctccctccctcgatcctaaccaccctccatcccccccctcactccctccctcccgctttccatccttcctccctcccttccctctttccttccttcctgccttcttccattccccttcccctcttccttctgtccttccttcctgtgtgtaaaagaaaaattggtgaatagaagaataattgaataactgcctgagtcacttatacatttctcatctcactctggggacacagaagaccgtgttgtactcatctcctcgattttaaaaacagtcattctaaaatcaaggattctagatgtatcacttctaggcgaaatcttgaaagaaaatgtgtaagagtttcatgtgctcttcatctctatgatcacaattgaagaaggcaggaggttgagatgctgcatcgccaagatcgtggtgattccattatcattacccttgtaacttgtgagcatccttactgccagcaatcattattagatatggaatctgatataggagttcatatttactgtatgaatatcttggtgtgggagtgttggctcatgcctgtaatcccagtgctttgggaggcagaggcaggaggctcgcttgaacccaggagttcgagacaagccggaagagcatggcgagaccctcgtctctacaaaaatgtaaaaatcagccaagtgtgctggtaggtgcctgtagtctcagctccttaggaggctgaagtgttaggatcgctttcgcccgggatgtaatggctacagggagtcgagatcttgccactgaacttcagcctgggcaacagagcaagactctctctcaaaaataaaatgctttttcctttaggcttaaattctaacactcaaacctccaaagcggaggtattaggaggtggggcccttgggagatgatgagattatgaaagtggaaccctcgtaaatgggattagtgcccttctgaaagtgacggaagagagctcgccagcaccttccatgtggggagacagggaggatatgacagtctccaacctggaagagggtcctcaccagaccccgatcatgctggcactctcatcgtggacttccggcctccagaactctgatcaacaaatgtgtgttcttaaagaaaaaaaaagtgtggaaagcaatgttaatgttcccaatcactttgagtacattctttccttaactatgtcttaatgcatagttgtgttggatggcctagtttgtaatgttagaatatgcatgttagtgaattaataaatacagcagtaaagaatagagttgtggttgggaatggtgtctcacgcctgtaatcccagcacaatggcatgccgaggcgggtcaatcacctgtagtcgggaggtggagatcaccctgaccaacatggagaaatcccgactctactaaaaatacaaatcagcctgtcatagaggcacatgcctttaatcccagctactcgggaggctgaggcaggagaatcacttgaacctaggaggcagaggttgcggtgagccgagatcgcgccattgcactccagcctgggcaacaaaagctaaattctatatcaaaaaattaaaaaaaaaaaaaaaagaaggctgtttgttgaccatttgagtggccagtcttggtgcttcctggtgggcgaggagagccctaccccattcctacccattccagtagtcatggcataagagtgattctcgctttctgctatagcctccttatccattggctgaaatgattcttttttaatgtgtcttataaatgcttccatagcaaaaaaaattgaattgacttttatagggactctttcggggattgttacccatcattccataatttgtttgtactcctagaaaagggaagtatgccgagcacagtggatatttcgtctcaaataataaataaataaccaaatagaaaagaaagaaaaggaagtaaagggaaatatacaaatatacaaggtgttaggagagagttgctaatcgtgattcccccttaattgtccaaacagaccacctctggggatctattcgtaaaagactcgttagaagtgcagactcatgcatttgagaatcactcagggaaatctgaagatgacctgtggtgggggtgtaaatggatacttaaatgtgtcttgtgattgtgtgagagtgtgactgtgtgtttgtgtgtgtgctgtcatctgtggagtgggggatcctcttttgccttgagaaagctcatctctgtccacttactctgggctctaccatctgtgccttgtatccagtagaaataaaacagtttgcggcagaaatggagttttattttattttactttactttttattaggattatttgtagaccgggtctcactctgtcactcaggcgggagtgcaacggcacgatctcagatcactgcaacctgtgcctcctgcactgaagccatcctcccacctcagcctctggagtggggagatcccacacctgtgtaatttttgcattttttctagagatggggtttcctcatgctgcccgggctggtttccaacgcccgggctcaagtgatccacccgcctcagcctcccaaagtgctgggattacaggtgggagctactgtgcccggccagaaatggagatttttgttcttcttttgatgagacggaacctcgcaccgtggcccaggctggagtgcagtggagtgacctcggctcactgcaagctctgcctcctggggtcatgccattctcctgcctcagcctcccaaagagctgggactacaggcgcccgacaccacgcccagctaaggtttttgcatttatttttttattttttttgtagggacgggctttcaccgtgttagccaggacggtctcgatctcctgccctcgtgatgcacccgcctgagcctcccgaagtgctcggattacaggcatgagccaccatgcacggcccagaaatggagatttttgagcaaacacattaaagaaaagaaacgcaaatagacgaaactcattttaacatttttatttaacccaaggaatacagatataatcaacaccaatacaattgatgtcacagtgatgactaagatacatgctacaatccttcattctcagatgcaaaatctagtatgtgttttacagcaaacgtcagttggaaactgaacgtcgatcacacatgcttgatgtgcatgtcaatttcatgagagttacaatctcaggagaagtctcacatagcgtaagagtccaaacataccttcaagtgtttcgacaagttcttcactactcattcttagaactgaatttaccaacaacaatcccagcctattcattgctgaactgcatcccattgaaagaatgggtcacagttcctctctctagacactgtggaacgacattgaaggcccctccatcttttggcgattgtgaggacaggtgctagaagcctctgccctcagccttgtccacgtgaattctaattcctttagaacaactatctcagggtgggaaagatggttccaatgctaagtgcctattgcattgattatgaatcaatgaaactctttctccctgggggttgtcccagttggattccaagcagcactgtcagagtgttccagcttctccacatgctccgcagcccttgggatggtgagtgattgtctcggtggcttctgggagagcttcttggttgttgttgaaggtgtatttgacgtgcatttccccaggggagggacagtgaacgctttttgaagtggttctttacatcccctttgaggaaatgtctgctcaagtctctggctgggttttgaacagaatcatttgtttgttccattggagttttgacaactctgtgtattctgagcatgagcagtccttgcacgtatatgagatttgcaaatattttgtgccccaatctcaaggttgctctttgatacaaatcaagagcatctgaggcagagcaaaggttcaggtgagaggacggagcatttctccacctctccagcatgcgcagcatctctctcctccgagatgccgagacatgtgtgcagggagacaccatgaaaaagcaggtgtgcttcattctgaatagagcgtctctgattcccgtctggtgcctgagggtgcatggcccatgagccttagaagagacgtcttcgggccttgcacgttggcctccatagaaacttgtggcaaattctgggctccggactgggtgatggaggtagaggtctgagggcagaggtgggcaggggctccaggccatggagatccaagtggaattcttcaggcagagcctgtctccagggactaggcttgggcatttgggatgagccctgggggacggccgctctgtagtcaggtttgaggtagaggacacgccaggaagaagggctgactccatgcacaaggtttgctgggggtcccatcaggggcaggaagccttggggagcctcaccctcttctactgaaggcgccacacacacattctctgctctctgggctctcacagatccattttcaatgtcaatctcccagacagtctctgtactagtgagcaggagccagcgggcatgggcagggtacaagagatccttcagggacatcaagagttgctcagggaccaccaggagctgcacattgaggaggctgagtcgcagggctccctgtgggtccagccccaggaactcctgccccaggcgcaggtgcaggaccattcctggttccaagaccgcgatgatcatcttcctctggggaagctgtgggccctgggggagaaaagccgtgggtcagtcattgtcctctgagggtggctcaaacagggagagagcaaggcggggagctgccagtaacttccccaggcataaatgaaaccccgcagggacacccagaattggcacctgtattgacgccccttgggacggtgatttcctgcaagtcccctagggcctggagctcaggcagacctgtctcacccacgcccacctaggtggtgtgaccttacctggggcagctccaggggcagctgtgcagggtggtggggagctggctgtaccggagctggttctgcacctgtggagagagcagagtgtgcaggtgaaagcccttgtcatgcaggatgcccttgagggttcaaggtgccaccgtgagaaagaccaaatacagaagaagccaggtacaggacacccagccacggagctgcaggaggaagctcccgacactctggacagcacagctgctcgcctcatgacgtgacgggacactggcttggtagcaggggactcaggatgaaaaagagaagatgcctcacctggatgaggacccagctcctccactttctggcgttttggggcatttgatggcgtgccgctggagctgtaggacagagagacacagtcagatttcgggcagttccctaacgtccaattccctgaatccccacaaattcactccacttccctgcctttcattcaaggccacagactcgtcatccacttcctgtgagacctgctcccaatctgtcctaactcccagctgttcttgttctcaccccatctacctgagcttccctgggtgaagaaaaggcagggaaggagggtcggtgcccacagggagcagtttaccctttcaggagctcatgcagatgagagttggaaaactctccttgggtgtgaggagctggagaaagatgttgagatcccggagaggtggcacctctgtctacacaggtaacaaaggaatggggtcttaggattcgaatcacagcaggagaagaggaaggaatttgtcgggcatgacggcatgcgcctgtaatcccagcactttgggaggccaaggtcggaggattgcttgagtccaggagtttgagagcagcctgggcaacatggtgaaagctagtctccactaaaaatactaaacattagtgggtcatggtggtgcatgcctgtggtctcacctactcaggaggctcaggtgggaggatcacctgcgactcagaggtggagcccgcagtcagctaaaatcacgccactgcactccagtgtggaccatcggagtgagacgctgtctcaataaaataaatcagtaaataagacaaatagaaaaattaaaaatgaaaaaaggaggaaactgttttatttttcctagtagatcttgaaactctcacatcatgtcctacaatctcccttcttgcagaacacagaacccattccctgtggagctggttgggtggattgaaagtggggctgccctgagatatgtgtgtggttgcgatgtagaagccttcccagcaccctgtgatgacttacgggcacctcacttccctctggccccaaattcaaaacatccaatctcatggcaggttcatgcacccttttcccttcccctctctccaacacacacccacacatcccacaggcaggtcaccccgcaggcgtccccagcacatagcaaagctcacccgctctctcctgcgtggtcgctcttggattcggtgcaggaatcactggggcttcttgggcgccgggaacctttcatggtgaaaatttccagggttctccaagtcagccactgccagtgtttgtctgtctcctgcaaagatttcttcttggctcccgaatcctttagttcctttgagagagtggtgtcagccccaaagctgctcccgaaggcttgggttgtgtagcgacggggctgtggccagcggcaggtggatgaggctctgacaactgagctcttgggggaatcttgtacactgtcagcagggggtggagccaggggatttgtcagcaggaactgatgtgattggctgttcctggtatgacaacgggaggggccctcatggaggattggggcgtaactcaatcgatagatgaccgatcaacagaacctgcctaaccccatcaagagccaacctgtttcctgtcccctcccatcctctaggtcttgcctaataatgatagacactttctgtcatacccaattcatccatcgctgaaatagtttttcatgtgtgccttttatattttcatgcaaaaaaaatatgttaattttcacgggggctatcctggggaatgctatgtacatgaaatgaagtgtcaaaggagcagaagcagaaggaaattcacaagcttctctgagcgtctctgcttgaattcctgccatgtttcctaaacatgttggcttctttcttcctacccaagtaagaaggtgcttcagaagatcaatcttagggcatttgacaaacgctgctgagaatttcaggatgacacgaaggaacctttgattggatttgtggatgtgcctgtgaaagcgtgtgtgtgtgtgtgtgtgtgtgtgtgtgtgtgtgtgaagccaggatgaagtggctgttcctggggtggagacccttctttctcttgagaatgttcattgctgttgactcattgtgggttttggagatattttctctctttctttcgttctttcagacattttttgctttctccctccctcgatcctaaccaccctccatcccccccctcactccctccctcccgctttccatccttcctccctcccttccctctttccttccttcctgccttcttccattccccttcccctcttccttctgtccttccttcctgtgtgtaaaagaaaaattggtgaatagaagaataattgaataactgcctgagtcacttatacatttctcatctcactctggggacacagaagaccgtgttgtactcatctcctcgattttaaaaacagtcattctaaaatcaaggattctagatgtatcacttctaggcgaaatcttgaaagaaaatgtgtaagagtttcatgtgctcttcatctctatgatcacaattgaagaaggcaggaggttgagatgctgcatcgccaagatcgtggtgattccattatcattacccttgtaacttgtgagcatccttactgccagcaatcattattagatatggaatctgatataggagttcatatttactgtatgaatatcttggtgtgggagtgttggctcatgcctgtaatcccagtgctttgggaggcagaggcaggaggctcgcttgaacccaggagttcgagacaagccggaagagcatggcgagaccctcgtctctacaaaaatgtaaaaatcagccaagtgtgctggtaggtgcctgtagtctcagctccttaggaggctgaagtgttaggatcgctttcgcccgggatgtaatggctacagggagtcgagatcttgccactgaacttcagcctgggcaacagagcaagactctctctcaaaaataaaatgctttttcctttaggcttaaattctaacactcaaacctccaaagcggaggtattaggaggtggggcccttgggagatgatgagattatgaaagtggaaccctcgtaaatgggattagtgcccttctgaaagtgacggaagagagctcgccagcaccttccatgtggggagacagggaggatatgacagtctccaacctggaagagggtcctcaccagaccccgatcatgctggcactctcatcgtggacttccggcctccagaactctgatcaacaaatgtgtgttcttaaagaaaaaaaaagtgtggaaagcaatgttaatgttcccaatcactttgagtacattctttccttaactatgtcttaatgcatagttgtgttggatggcctagtttgtaatgttagaatatgcatgttagtgaattaataaatacagcagtaaagaatagagttgtggttgggaatggtgtctcacgcctgtaatcccagcacaatggcatgccgaggcgggtcaatcacctgtagtcgggaggtggagatcaccctgaccaacatggagaaatcccgactctactaaaaatacaaatcagcctgtcatagaggcacatgcctttaatcccagctactcgggaggctgaggcaggagaatcacttgaacctaggaggcagaggttgcggtgagccgagatcgcgccattgcactccagcctgggcaacaaaagctaaattctatatcaaaaaattaaaaaaaaaaaaaaaagaaggctgtttgttgaccatttgagtggccagtcttggtgcttcctggtgggcgaggagagccctaccccattcctacccattccagtagtcatggcataagagtgattctcgctttctgctatagcctccttatccattggctgaaatgattcttttttaatgtgtcttataaatgcttccatagcaaaaaaaattgaattgacttttatagggactctttcggggattgttacccatcattccataatttgtttgtactcctagaaaagggaagtatgccgagcacagtggatatttcgtctcaaataataaataaataaccaaatagaaaagaaagaaaaggaagtaaagggaaatatacaaatatacaaggtgttaggagagagttgctaatcgtgattcccccttaattgtccaaacagaccacctctggggatctattcgtaaaagactcgttagaagtgcagactcatgcatttgagaatcactcagggaaatctgaagatgacctgtggtgggggtgtaaatggatacttaaatgtgtcttgtgattgtgtgagagtgtgactgtgtgtttgtgtgtgtgctgtcatctgtggagtgggggatcctcttttgccttgagaaagctcatctctgtccacttactctgggctctaccatctgtgccttgtatccagtagaaataaaacagtttgcggcagaaatggagttttattttattttactttactttttattaggattatttgtagaccgggtctcactctgtcactcaggcgggagtgcaacggcacgatctcagatcactgcaacctgtgcctcctgcactgaagccatcctcccacctcagcctctggagtggggagatcccacacctgtgtaatttttgcattttttctagagatggggtttcctcatgctgcccgggctggtttccaacgcccgggctcaagtgatccacccgcctcagcctcccaaagtgctgggattacaggtgggagctactgtgcccggccagaaatggagatttttgttcttcttttgatgagacggaacctcgcaccgtggcccaggctggagtgcagtggagtgacctcggctcactgcaagctctgcctcctggggtcatgccattctcctgcctcagcctcccaaagagctgggactacaggcgcccgacaccacgcccagctaaggtttttgcatttatttttttattttttttgtagggacgggctttcaccgtgttagccaggacggtctcgatctcctgccctcgtgatgcacccgcctgagcctcccgaagtgctcggattacaggcatgagccaccatgcacggcccagaaatggagatttttgagcaaacacattaaagaaaagaaacgcaaatagacgaaactcattttaacatttttatttaacccaaggaatacagatataatcaacaccaatacaattgatgtcacagtgatgactaagatacatgctacaatccttcattctcagatgcaaaatctagtatgtgttttacagcaaacgtcagttggaaactgaacgtcgatcacacatgcttgatgtgcatgtcaatttcatgagagttacaatctcaggagaagtctcacatagcgtaagagtccaaacataccttcaagtgtttcgacaagttcttcactactcattcttagaactgaatttaccaacaacaatcccagcctattcattgctgaactgcatcccattgaaagaatgggtcacagttcctctctctagacactgtggaacgacattgaaggcccctccatcttttggcgattgtgaggacaggtgctagaagcctctgccctcagccttgtccacgtgagttctaattcctttagaacaactatctcagggtgggaaagatggttccaatgctaagtgcctattgcattgattatgaatcaatgaaactctttctccctgggggttgtcccagttggattccaagcagcactgtcagagtgttccagcttctccacatgctccgcagcccttgggatggtgagtgattgtctcggtggcttctgggagagcttcttggttgttgttgaaggtgtatttgacgtgcatttccccaggggagggacagtgaacgctttttgaagtggttctttacatcccctttgaggaaatgtctgctcaagtctctggctgggttttgaacagaatcatttgtttgttccattggagttttgacaactctgtgtattctgagcatgagcagtccttgcacgtatatgagatttgcaaatattttgtgccccaatctcaaggttgctctttgatacaaatcaagagcatctgaggcagagcaaaggttcaggtgagaggacggagcatttctccacctctccagcatgcgcagcatctctctcctccgagatgccgagacatgtgtgcagggagacaccatgaaaaagcaggtgtgcttcattctgaatagagcgtctctgattcccgtctggtgcctgagggtgcatggcccatgagccttagaagagacgtcttcgggccttgcacgttggcctccatagaaacttgtggcaaattctgggctccggactgggtgatggaggtagaggtctgagggcagaggtgggcaggggctccaggccatggagatccaagtggaattcttcaggcagagcctgtctccagggactaggcttgggcatttgggatgagccctgggggacggccgctctgtagtcaggtttgaggtagaggacacgccaggaagaagggctgactccatgcacaaggtttgctgggggtcccatcaggggcaggaagccttggggagcctcaccctcttctactgaaggcgccacacacacattctctgctctctgggctctcacagatccattttcaatgtcaatctcccagacagtctctgtactagtgagcaggagccagcgggcatgggcagggtacaagagatccttcagggacatcaagagttgctcagggaccaccaggagctgcacattgaggaggctgagtcgcagggctccctgtgggtccagccccaggaactcctgccccaggcgcaggtgcaggaccattcctggttccaagaccgcgatgatcatcttcctctggggaagctgtgggccctgggggagaaaagccgtgggtcagtcattgtcctctgagggtggctcaaacagggagagagcaaggcggggagctgccagtaacttccccaggcataaatgaaaccccgcagggacacccagaattggcacctgtattgacgccccttgggacggtgatttcctgcaagtcccctagggcctggagctcaggcagacctgtctcacccacgcccacctaggtggtgtgaccttacctggggcagctccaggggcagctgtgcagggtggtggggagctggctgtaccggagctggttctgcacctgtggagagagcagagtgtgcaggtgaaagcccttgtcatgcaggatgcccttgagggttcaaggtgccaccgtgagaaagaccaaatacagaagaagccaggtacaggacacccagccacggagctgcaggaggaagctcccgacactctggacagcacagctgctcgcctcatgacgtgacgggacactggcttggtagcaggggactcaggatgaaaaagagaagatgcctcacctggatgaggacccagctcctccactttctggcgttttggggcatttgatggcgtgccgctggagctgtaggacagagagagagacacagtcagatttcgggcagttccctaacgtccaattccctgaatccccacaaattcactccacttccctgcctttcattcaaggccacagactcgtcatccacttcctgtgagacctgctcccaatctgtcctaactcccagctgttcttgttctcaccccatctacctgagcttccctgggtgaagaaaaggcagggaaggagggtcggtgcccacagggagcagtttaccctttcaggagctcatgcagatgagagttggaaaactctccttgggtgtgaggagctggagaaagatgttgagatcccggagaggtggcacctctgtctacacaggtaacaaaggaatggggtcttaggattcgaatcacagcaggagaagaggaaggaatttgtcgggcatgacggcatgcgcctgtaatcccagcactttgggaggccaaggtcggaggattgcttgagtccaggagtttgagagcagcctgggcaacatggtgaaagctagtctccactaaaaatactaaacattagtgggtcatggtggtgcatgcctgtggtctcacctactcaggaggctcaggtgggaggatcacctgcgactcagaggtggagcccgcagtcagctaaaatcacgccactgcactccagtgtggaccatcggagtgagacgctgtctcaataaaataaatcagtaaataagacaaatagaaaaattaaaaatgaaaaaaggaggaaactgttttatttttcctagtagatcttgaaactctcacatcatgtcctacaatctcccttcttgcagaacacagaacccattccctgtggagctggttgggtggattgaaagtggggctgccctgagatatgtgtgtggttgcgatgtagaagccttcccagcaccctgtgatgacttacgggcacctcacttccctctggccccaaattcaaaacatccaatctcatggcaggttcatgcacccttttcccttcccctctctccaacacacacccacacatcccacaggcaggtcaccccgcaggcgtccccagcacatagcaaagctcacccgctctctcctgcgtggtcgctcttggattcggtgcaggaatcactggggcttcttgggcgccgggaacctttcatggtgaaaatttccagggttctccaagtcagccactgccagtgtttgtctgtctcctgcaaagatttcttcttggctcccgaatcctttagttcctttgagagagtggtgtcagccccaaagctgctcccgaaggcttgggatgtgtagcgacggggctgtggccagcggcaggtggatgaggctctgacaactgagctcttgggggaatcttgtacactgtcagcagggggtggagccaggggatttgtcagcaggaactgatgtgattggctgttcctggtatgacaacgggaggggccctcatggaggattggggcgtaactcaatccatagatgaccgatcaacagaacctgcctaatcccatcaagagccaacctgtttcctgtcccctcccatcctctaggtcttgcctaataatgatagacactttctgtcatacccaattcatccatcgctgaaatagtttttcatgtgtgccttttatattttcatgcaataaaaatatgttaattttcacggtggctatcctggggaatgctatgtacatgaaatgaagtgtcaaaggagcagaagcagaaggaaattcacaagcttctctgagcgtctctgcttcaattcctgccatgtttcctaaacatgttggcttctttcttcctacccaagtaagaaggtgcttcagaagttcaatcttagggcatttgacaaacgccgctgagaatttcaggatgacacgaaggaacctttgattggatttgtggatgtgcctgtgaaagcgtgtgtgtgtgtgtgtgtgtgtgtgtgtgtgtgtgtgtgtgtgtgaagccaggatgaagtggctgttcctggggtggagacccttctttctcttgagaatgttcattgctgttgactcattgtgggttttggagatattttctctctttctttcgttctttcagacattttttgctttctccctccctcgatcctaacccccctccatccccccctcactccctccctccctctttccatccttcctccctcccttccctctttccttccttcctgccttcttcccttccccttcccctcttccacgcctgtaatcccagcacaatggcatgccgaggcgggtcaatcacctgtagtcgggaggtggagatcaccctgaccaacatggagaaacccgactctactaaaaatacaaatcagcctgtcatagaggcacatgcctttaatcccagctactcgggaggctgaggcaggagaatcacttgaacctaggaggcagaggttgcggtgagccgagatcgcgccattgcactccagcctgggcaacaaaagctaaattctatatcaaaaaattaaaaaaaaaaaaaagaaggctgtttgttgaccatttgagtggccagtcttggtgcttcctggtgggcgaggagagccctgccccattcctacccattccagtagtcatggcataagagtgattctcactttctgctatagcctccttatccattggctgaaatgattgttttttaatgtgtcttataaatgcttccatagcaaaaaaaattgaattgacttttatagggactctttcgggtattgttacccatcattctataatttgtttgtactcctagaaaagggaagtatgccgagcacagtggatatttcgtctcaaataacaaataaataaccaaatagaaaagaaagaaaaggaagtaaagggaaatatacaaatatacaaggtgttaggagagagttgctaatcgtgattcccccttaattgtccaaacagaccacctctggggatctattcgtaaaagactcgttagaagtgcagactcatgcatttgagaatcactcagggaaatctgaagatgacctgtggtgggggtgtaaatggatacttaaatgtgtcttgtgattgtgtgagagtgtgactgtgtgtttgtgtgtgtgctgtcatctgtggagtgggggatcctcttttgccttgagaaagctcatctctgtccacttactctgggctctaccatctgtgccttgtatccagtagaaataaaacagtttgcggcagaaatggagttttattttattttactttactttttattaggattatttgtagaccgggtctcactctgtcactcaggctggagtgcaacggcacgatctcagatcactgcaacctgtgcctcctgcactgaagccatcctcccacctcagcctctggagtggggagatcccacacctgtgtaatttttgcattttttctagagatggggtttcctcatgctgcccgggctggtttccaacgcccgggctcaagtgatccacccgcctcagcctcccaaagtgctgggattacaggtgggagctactgtgcccggccagaaatggagatttttgttcttcttttgatgagacggaacctcgcaccgtggcccaggctggagtgcagtggagtgacctcggctcactgcaagctctgcctcctgaggtcatgccattctcctgcctcagcctcccaaagagctgggactacaggcgcccgacaccacgcccagctaaggtttttgcatttattttttttttttttgtagggacgggctttcaccgtgttagccaggacggtctcgatctcctgccctcgtgatgcacccgcctgagcctcccgaagtgctcggattacaggcatgagccaccatgcacggcccagaaatggagatttttgagcaaacacattaaagaaaagaaacgcaaatagacgaaactcattttaacatttttatttaacccaaggaatacagatataatcaacaccaatacaattgatgtcacagtgatgactaagatacatgctacaatccttcattctcagatgcaaaatctagtatgtgttttacagcaaacgtcagttggaaactgaacgtcgatcacacatgcttgatgtgcatgtcaatttcatgagagttacaatctcaggagaagtctcacatagcgtaagagtccaaacataccttcaagtgtttcgacaagttcttcactactcattcttagaactgaatttaccaacaacaatcccagcctattcattgctgaactgcatcccattgaaagaatgggtcacagttcctctctctagacactgtggaacgacattgaaggcccttccatcttttggcgattgtgaggacaggtgctagaagcctctgccctcagccttgtccacgtgagttctaattcctttagaacaactatctcagggtgggaaagatggttccaatgctaagtgcctattgcattgattatgaatcaatgaaactctttctccctgggggttgtcccagttggattccaagcagcactgtcagagtgttccagcttctccacatgctccgcagcccttgggatggtgagtgattgtcacggtggcttctgggagagcttcttggttgttgttgaaggtgtatttgacgtgcatttccccaggggagggacagtgaacgctttttgaagtggttctttacatcccctttgaggaaatgtctgctcaagtctctggctgggttttgaacagaatcatttgtttgtcccattggagttttgacaactctgtgtattctgagtatgagcagtccttgcacgtatatgagatttgcaaatattttgtgccccaatctcaaggttgctctttgatacaaatcaagagcatctgaggcagagcaaaggttcaggtgagaggacggagcatttctccacctctccagcatgcgcagcatctctctcctccgagatgccgagacatgtgtgcagggagacaccatgaaaaagcaggtgtgcttcattctgaatagagcgtctctgattcccgtctggtgcctgagggtgcatggcccatgagccttagaagagacgtcttcgggccttgcacgttggcctccatagaaacttgtggcaaattctgggctccggactgggtgatggaggtagaggtctgagggcagaggtgggcaggggctccaggccgtggagatccaagtggaattcttcaggcagagcctgtctccagggactaggcttgggcatttgggatgagccctgggggacggccgctctgtagtcaggtttgaggtagaggacacgccaggaagaagggctgactccatgcacaaggtttgctgggggtcccatcaggggcaggaagccttggggagcctcaccctcttctactgaaggcgccacacacacattctctgctctctgggctctcacagatccattttcaatgtcaatctcccagacagtctctgtactagtgagcaggagccagcgggcatgggcagggtacaagagatccttcagggacatcaagagttgctcagggaccaccaggagctgcacattgaggaggctgagtcgcagggctccctgtgggtccagccccaggaactcctgccccaggcgcaggtgcaggaccattcctggttccaagaccgcgatgatcatcttcctctggggaagctgtgggccctgggggagaaaagccgtgggtcagtcattgtcctctgagggtggctcaaacagggagagagcaaggcggggagctgccagtaacttccccaggcataaatgaaaccccgcagggacacccagaattggcacctgtattgacgccccttgggacggtgatttcctgcaagtcccctagggcctggagctcaggcagacctgtctcacccacgcccacctaggtggtgtgaccttacctggggcagctccaggggcagctgtgcagggtggtggggagctggctgtaccggagctggttctgcacctgtggagagagcagagtgtgcaggtgaaagcccttgtcatgcaggatgcccttgagggttcaaggtgccaccgtgagaaagaccaaatacagaagaagccaggtacaggacacccagccacggagctgcaggaggaagctcccgacactctggacagcacagctgctcgcctcatgacgtgacgggacactggcttggtagcaggggactcaggatgaaaaagagaagatgcctcacctggatgaggacccagctcctccactttctggcgttttggggcatttgatggcgtgccgctggagctgtaggacagagagacacagtcagatttcgggcagttccctaacgtccaattccctgaatccccacaaattcactccacttccctgcctttcattcaaggccacagactcgtcatccacttcctgtgagacctgctcccaatctgtcctaactcccagctgttcttgttctcaccccatctacctgagcttccctgggtgaagaaaaggcagggaaggagggtcggtgcccacagggagcagttgaccctttcaggagctcatgcagatgagagttggaaaactctccttgggtgtgaggagctggagaaagatgttgagatcccggagaggtggcacctctgtctacacaggtaacaaaggaatggggtcttaggattcgaatcacagcaggagaagaggaaggaatttgtcgggcatgacggcatgcgcctgtaatcccagcactttgggaggccaaggtcggaggattgcttgagtccaggagtttgagagcagcctgggcaacatggtgaaagctagtctccactaaaaatactaaacattagtgggtcatggtggtgcatgcctgtggtctcacctactcaggaggctcaggtgggaggatcacctgcgactcagaggtggagcccgcagtcagctaaaatcacgccactgcactccagtgtggaccatcggagtgagacgctgtctcagtaaaataaatcagtaaataagacaaatagaaaaattaaaaatgaaaaaaggaggaaactgttttatttttcctagtagatcttgaaactctcacatcatgtcctacaatctcccttcttgcagaacacagaacccattccctgtggagctggttgggtggattgaaagtggggctgccctgagatatgtgtgtggttgcgatgtagaagccttcccagcaccctgtgatgacttacgggcacctcacttccctctggccccaaattcaaaacatccaatctcatggcaggttcatgcacccttttcccttcccctctctccaacacacacccacacatcccacaggcaggtcaccccgcaggcgtccccagcacatagcaaagctcacccgctctctcctgcgtggtcgctcttggattcggtgcaggaatcactggggcttcttgggcgccgggaacctttcatggtgaaaatttccagggttctccaagtcagccactgccagtgtttgtctgtctcctgcaaagatttcttcttggctcccgaatcctttagttcctttgagagagtggtgtcagccccaaagctgctcccgaaggcttgggttgtgtagcgacggggctgtggccagcggcaggtggacgaggctccgacaactgagctcttgggggaatcttgtacactgtcagcagggggtggagccaggggatttgtcagcaggaactgatgtgattggctgttcctggtatgacaacgggaggggccctcatggaggattggggcgtaactcaatccatagatgaccgatcaacagaacctgcctaatcccatcaagagccaacctgtttcctgtcccctcccatcctctaggtcttgcctaataatgatagacactttctgtcatacccaattcatccatcgctgaaatagtttttcatgtgtgccttttatattttcatgcaataaaaatatgttaattttcacggtggccatcctggggaatgctatgtacatgaaatgaagtgtcaaaggagcagaagcagaaggaaattcacaagcttctctgagcgtctctgcttcaattcctgccatgtttcctaaatatgttggcttctttcttcctacccaagtaagaaggtgcttcagaagatcaatcttatggcatttgacaaaccctgctgagaatttcaggatgacacgaaggaacctttgattggatttgtggatgtgcctgtgaaagcgtgtgtgtgtgtgtgtgtgtgtgtgtgtgtgtgtgtgtgaagccaggatgaagtggctgttcctggggtggagacccttctttctcttgagaatgttcattgctgttgactcattgtgggttttggagatattttctctctttctttcgttctttcagacattttttgctttctccctccctggatcctaacccccctccatcccccccctcactccctccctccttgtttccatccttcctccctcccttccctctttccttccttcctgccttcttcccttccccttcccctcttccttctgtccttccttcctgtgtgtaaaagaaaaattggtgaatagaagaataattgaataactgcctgagtcacttatacatttctcatctcactctggggacacagaagaccgtgttgtactcatctcctcgattttaaaaacagtcattctaaaatcaaggattctagatgtatcacttctaggcgaaatcttgaaagagaatgtgtaagagtttcatgtgctcttcatctctatgatcacaattgaagaaggcaggaggttgagatgctgcatcgccaagatcgtggtgattccattatcattacccttgtaacttgtgagcatccttactgccagcaatcattattagatatggaatctgatataggagttcatatttactgtatgaatatcttggtgtgggagtgttggctcatgcctgtaatcccagtgctttgggaggcagaggcaggaggctcgcttgaacccaggagttcgagacaagccggaagagcatggcgagaccctcgtctctacaaaaatgtaaaaatcagccaagtgtgctggtaggtgcctgtagtctcagctccttaggaggctgaagtgttaggatcgctttcgcccgggatgtaatggctacagggagtcgagatcttgccactgaacttcagcctgggcaacagagcaagactctctctcaaaaataaaatgctttttcctttaggcttaaattctaacactcaaacctccaaagcggaggtattaggaggtggggcccttgggagatgatgagattatgaaagtggaaccctcgtaaatgggattagtgcccttctgaaagtgacggaagagagctcgccagcaccttccatgtggggagacagggaggatatgacagtctccaacctggaagagggtcctcaccagaccccgatcatgctggcactctcatcgtggacttccggcctccagaactctgatcaacaaatgtgtgttcttaaagaaaaaaaaagtgtggaaagcaatgttaatgttcccaatcactttgagtacattctttccttaactatgtcttaatgcatagttgtgttggatggcctagtttgtaatgttagaatatgcatgttagtgaattaataaatacagcagtaaagaatagagttgtggttgggaatggagtctcacgcctgtaatcccagcacaatggcatgccgaggcgggtcaatcacctgtagtcgggaggtggagatcaccctgaccaacatggagaaacccgactctactaaaaatacaaatcagcctgtcatagaggcacatgcctttaatcccagctactcgggaggctgaggcaggagaatcacttgaacctaggaggcagaggttgcggtgagccgagatcgcgccattgcactccagcctgggcaacaaaagctaaattctatatcaaaaaattaaaaaaaaaaaaaagaaggctgtttgttgaccatttgagtggccagtcttggtgcttcctggtgggcgaggagagccctgccccattcctacccattccagtagtcatggcataagagtgattctcactttctgctatagcctccttatccattggctgaaatgattcttttttaatgtgtcttattaatgcttccatagcaaaaaatattgaattgacttttatagggactctttcggggattgttacccatcattccataatttgtttgtactcctagaaaagggaagtatgccgagcacagtggatatttcgtctcaaataataaataaataaccaaatagaaaagaaagaaaaggaagtaaagggaaatatacaaatatacaaggtgttaggagagagttgctaatcgtgattcccccttaattgtccaaacagaccacctctggggatctattcgtaaaagactcgttagaagtgcagactcatgcatttgagaatcactcagggaaatctgaagatgacctgtggtgggggtgtaaatggatacttaaatgtgtcttgtgattgtgtgagagtgtgactgtgtgtttgtgtgtgtgctgtcatctgtggagtgggggatcctcttttgccttgagaaagctcatctctgtccacttactctgggctctaccatctgtgccttgtatccagtagaaataaaacagtttgcggcagaaatggagttttattttatttcactttactttttattaggattatttgtagaccgggtctcactctgtcactcaggctggagtgcaatggcacgatctcagatcactgcaacctgtgcctcctgcactgaagccatcctcccacctcagcctctggagtggggagatcccacacctgtgtaatttttgcattttttctagagatggggtttcctcatgctgcccgggctggtttccaacgcctgggctcaagtgatccacccgcctcagcctcccaaagtgctgggattacaggtgggagctactgtgcccggccagagatggagatttttgttcttcttttgatgagacggaacctcgcaccgtggcccaggctggagtgcagtggagtgacctcggctcactgcaagctctgcctcctggggtcatgccattctcctgcctcagcctcccaaagagctgggactacaggcgcccgacaccacgcccagctaaggtttttgcatttttttttttttttgtagggacgggctttcaccgtgttagccaggacggtctcgatctcctgccctcgtgatgcacccgcctgagcctcccgaagtgctcggattacaggcatgagccaccatgcacggcccagaaatggagatttttgagcaaacacattaaagaaaagaaacgcaaatagacgaaactcattttaacatttttatttaacccaaggaatacagatataatcaacaccaatacaattgatgtcacaatgatgactaagatacctgctacaatccttcattctcagatgcaaaatctagtatgtgttttacagcaaacgtcagttggaaactgaacgtcgatcacacatgcttgatgtgcatgtcaatttcatgagagttacaatctcaggagaagtctcacatagcgtaagagtccaaacataccttcaagtgtttcgacaagttcttcactactcattcttagaactgaatttaccaacaacaatcccagcctattcattgctgaactgcatcccattgaaagaatgggtcacagttcctctctctagacactgtggaacgacattgaaggcccctccatcttttggcgattgtgaggacaggtgctagaagcctctgccctcagccttgtccacgtgagttctaattcctttagaacaactatctcagggtgggaaagatggttccaatgctaagtgcctattgcattgattatgaatcaatgaaactctttctccctgggggttgtcccagttggattccaagcagcactgtcagagtgttccagcttctccacatgctccgcagcccttgggatggtgagtgattgtcacggtggcttctgggagagcttcttggttgttgttgaaggtgtatttgacgtgcatttccccaggggagggacagtgaacgctttttgaagtggttctttacatcccctttgaggaaatgtctgctcaagtctctggctgggttttgaacagaatcatttgtttgtcccattggagttttgacaactctgtgtattctgagtatgagcagtccttgcacgtatatgagatttgcaaatattttgtgccccaatctcaaggttgctctttgatacaaatcaagaacatctgaggcagagcaaaggttcaggtgagaggacggagcatttctccacctctccagcatgcgcagcatctctctcctccgagatgccgagacatgtgtgcagggagacaccatgaaaaagcaggtgtgcttcattctgaatagagcgtctctgattcccgtctggtgcctgagggtgcatggcccatgagccttagaagagacgtcttcgggccttgcacgttggcctccatagaaacttgtggcaaattctgggctccggactgggtgatggaggtagaggtctgagggcagaggtgggcaggggctccaggccgtggagatccaagtggaattcttcaggcagagcctgtctccagggactaggcttgggcatttgggatgagccctgggggacggccgctctgtagtcaggtttgaggtagaggacacgccaggaagaagggctgactccatgcacaaggtttgctgctccaagtcagccactgccagtgtttgtctgtctcctgcaaagatttcttcttggctcccgaatcctttagttcctttgagagagtggtgtcagccccaaagctgctcccgaaggcttgggttgtgtagcgacggggctgtggccagcggcaggtggatgaggctctgacaactgagctcttgggggaatcttgtacactgtcagcagggggtggagccaggggatttgtcagcaggaactgatgtgattggctgttcctggtatgacaacgggaggggccctcatggaggattggggcgtaactcaatccatagatgaccgatcaacagaacctgcctaatcccatcaagagccaacctgtttcctgtcccctcccatcctctagctcttgcctaataatgatagacactttctgtcatacccaattcatccatcgctgaaatagtttttcatgtgtgccttttatattttcatgcaataaaaatatgttaattttcacggtggctatcctggggaatgctatgtacatgaaatgaagtgtcaaaggagcagaagcagaaggaaattcacaagcttctctgagcgtctctgcttgaattcctgccatgtttcctaaacatgttggcttctttcttcctacccaagtaagaaggtgcttcagaagatcaatcttagggcatttgacaaacgctgctgagaatttcaggatgacacgaaggaacctttgattggatttgtggatgtgcctgtgaaagcgtgtgtgtgtgtgtgtgtgtgtgtttgtgtgtgtgtgaagccaggatgaagtggctgttcctggggtggagacccttctttctcttgagaatgttcattgctgttgactcattgtgggttttggagatattttctctctttctttcgttctttcagacattttttgctttctccctccctcgatcctaacccccctctttccccccctcactccctccctccctctttccatccttcctccctcccttccctctttccttccttcctgccttcttcccttccccttcccctcttccttccgtccttccttcctgtgtgtaaaagaaaaattggtgaatagaagaataattgaataactgcctgagtcacttatacatttctcatctcactctggggacacagaagaccgtgttatactcatctcctcgattttaaaaacagtcattctaaaatcaaggattctagatgtatcacttctaggcgaaatcttgaaagaaaatgtgtaagagtttcatgtgctctttatctctatgatcacaattgaagaaggcaggaggttgagatgctgcatcgccaagatcgtggtgattccattatcattacccttgtaacttgtgagcatccttaccgccagcaatcattattagatatggaatctgatataggagttcatatttactgtatgaatatcttggtgtgggagtgttggctcatgcctgtaatcccagtgctttgggaggcagaggcaggaggctcgcttgaacccaggagttcgagacaagccggaagagcatggcgagaccctcgtctctacaaaaatgtaaaaatcagccaagtgtgctggtaggtgcctgtagtctcagctccttaggaggctgaagtgttaggatcgctttcgcccgggatgtaatggctacagggagtcgagatcttgccactgaacttcagcctgggcaacagagcaagactctctctcaaaaataaaatgctttttcctttaggcttaaattctaacactcaaacctccaaagcggaggtattaggaggtggggcccttgggagatgatgagattatgaaagtggaaccctcgtaaatgggattagtgcccttctgaaagtgacggaagagagctcgccagcaccttccatgtggggagacagggaggatatgacagtctccaacctggaagagggtcctcaccagaccccgatcatgctggcactctcatcgtggacttccggcctccagaactctgatcaacaaatgtgtgttcttaaagaaaaaaaaagtgtggaaagcaatgttaatgttcccaatcactttgagtacattctttccttaactatgtcttaatgcatagttgtgttggatggcctagtttgtaatgttagaatatgcatgttagtgaattaataaatacagcagtaaagaatagagttgtggttgggaatggtgtctcacgcctgtaatcccagcacaatggcatgccgaggcgggtcaatcacctgtagtcgggaggtggagatcaccctgaccaacatggagaaatcccgactctactaaaaatacaaatcagcctgtcatagaggcacatgcctttaatcccagctactcgggaggctgaggcaggagaatcacttgaacctagaaggcagaggttgcggtgagccgagatcgcgccattgcactccagcctgggcaacaaaagctaaattctatagcaaaaaattaaaaaaaaaaaaaagaaggctgtttgttgaccatttgagtggccagtcttggtgcttcctggtgggcgaggagagccctgccccattcctacccattccagtagtcatggcataagagtgattctcactttctgctatagcctccttatccattggctgaaatgattcttttttaatgtgtcttattaatgcttccatagcaaaaaaaattgaattgacttttatagggactctttcggggattgttacccatcattccataatttgtttgtactcctagaaaagggaagtatgccgagcacagtggatatttcgtctcaaataataaataaataaccaaatagaaaagaaagaaaaggaagtaaagggaaatatacaaatatacaaggtgttaggagagagttgctaatcgtgattcccccttaattgtccaaacagaccacctctggggatctattcgtaaaagactcgttagaagtgcagactcatgcatttgagaatcactcagggaaatctgaagatgacctgtggtgggggtgtaaatggatacttaaatgtgtcttgtgattgtgtgagagtgtgactgtgtgtttgtgtgtgtgctgtcatctgtggagtgggggatcctcttttgccttgagaaagctcatctctgtccacttactctgggctctaccatctgtgccttgtatccagtagaaataaaacagtttgcggcagaaatggagttttattttattttactttactttttattaggattatttgtagaccgggtctcactctgtcactcaggcgggagtgcaacggcacgatctcagatcactgcaacctgtgcctcctgcactgaagccatcctcccacctcagcctctggagtggggagatcccacacctgtgtaatttttgcattttttctagagatggggtttcctcatgctgcccgggctggtttccaacgcccgggctcaagtgatccacccgcctcagcctcccaaagtgctgggattacaggtgggagctactgtgcccggccagaaatggagatttttgttcttcttttgatgagacggaacctcgcaccgtggcccaggctggagtgcagtggagtgacctcggctcactgcaagctctgcctcctggggtcatgccattctcctgcctcagcctcccaaagagctgggactacaggcgcccgacaccacgcccagctaaggtttttgcatttttttttttttttttgtagggacgggctttcaccgtgttagccaggacggtctcgatctcctgccctcgtgatgcacccgcctgagcctcccgaagtgctcggattacaggcatgagccaccatgcacggcccagaaatggagatttttgagcaaacacattaaagaaaagaaacgcaaatagacgaaactcattttaacatttttatttaacccaaggaatacagatataatcaacaccaatacaattgatgtcacaatgatgactaagatacatgctacaatccttcattctcagatgcaaaatctagtatgtgttttacagcaaacgtcagttggaaactgaacgtcgatcacacatgcttgatgtgcatgtcaatttcatgagagttacaatctcaggagaagtctcacatagcgtaagagtccaaacataccttcaagtgtttcgacaagttcttcactactcattcttagaactgaatttaccaacaacaatcccagcctattcattgctgaactgcatcccattgaaagaatgggtcacagttcctctctctagacactgtggaacgacattgaaggcccctccatcttttggcgattgtgaggacaggtgctagaagcctctgccctcagccttgtccacgtgagttctaattcctttagaacaactatctcagggtgggaaagatggttccaatgctaagtgcctattgcattgattatgaatcaatgaaactctttctccctgggggttgtcccagttggattccaagcagcactgtcagagtgttccagcttctccacatgctccgcagcccttgggatggtgagtgattgtcacggtggcttctgggagagcttcttggttgttgttgaaggtgtatttgacgtgcatttccccaggggagggacagtgaacgctttttgaagtggttctttacatcccctttgaggaaatgtctgctcaagtctctggctgggttttgaacagaatcatttgtttgtcccattggagttttgacaactctgtgtattctgagtatgagcagtccttgcacgtatatgagatttgcaaatattttgtgccccaatctcaaggttgctctttgatacaaatcaagagcatctgaggcagagcaaaggttcaggtgagaggacggagcatttctccacctctccagcatgcgcagcatctctctcctccgagatgccgagacatgtgtgcagggagacaccatgaaaaagcaggtgtgcttcattctgaatagagcgtctctgattcccgtctggtgcctgagggtccatggcccatgagccttagaagagacgtcttcgggccttgcacgttggcctccatagaaacttgtggcaaattctgggctccggactgggtgatggaggtagaggtctgagagcagaggtgggcaggggctccaggccgtggagatccaagtggaattcttcaggcagagcctgtctccagggactaggcttgggcatttgggatgagccctgggggacggccgctctgtagtcaggtttgaggtagaggacacgccaggaagaagggctgactccatgcacaaggtttgctgggggtcccatcagggtcaggaagccttgcggagcctcaccctcttttactgaaggcgccacacacacattctctgctctctgggctctcacagatccattttcaatgtcaatctcccagacagtctctgtactagtgagcaggagccagcgggcatgggcagggtacaagagatccttcagggacatcaagagttgctcagggaccaccaggagctgcacattgaggaggctgagtcgcagggctccctgtgggtccagccccaggaactcctgccccaggcgcaggtgcaggaccattcctggttccaagaccgcgatgatcatcttcctctggggaagctgtgggccctgggggagaaaagccgtgggtcagtcattgtcctctgagggtggctcaaacagggagagagcaaggcggggagctgccagtaacttccccaggcataaatgaaaccccgcagggacacccagaattggcacctgtattgacgccccttgggacggtgatttcctgcaagtcccctagggcctggagctcaggcagacctgtctcacccacgcccacctaggtggtgtgaccttacctggggcagctccaggggcagttgtgcagggtggtggggagctggctgtaccggagctggttctgcacctgtggagagagcagagtgtgcaggtgaaagcccttgtcatgcaggatgcccttgagggttcaaggtgccaccgtgagaaagaccaaatacagaagaagccaggtacaggacacccagccacggagctgcaggaggaagctcccgacactctggacagcacagctgctcgcctcatgacgtgacgggacactggcttggtagcaggggactcaggatgaaaaagagaagatgcctcacctggatgaggacccagctcctccactttctggcgttttggggcatttgatggcgtgccgctggagctgtaggacagagagagagacacagtcagatttcgggcagttccctaacgtccaattccctgaatccccacaaattcactccacttccctgcctttcattcaaggccacagactcgtcatccacttcctgtgagacctgctcccaatctgtcctaactcccagctgttcttgttctcaccccatctacctgagcttccctgggtgaagaaaaggcagggaaggagggtcggtgcccacagggagcagtttaccctttcaggagctcatgcagatgagagttggaaaactctccttgggtgtgaggagctggagaaagatgttgagatcccggagaggtggcacctctgtctacacaggtaacaaaggaatggggtcttaggattcgaatcacagcaggagaagaggaaggaatttgtcgggcatgacggcatgcgcctgtaatcccagcactttgggaggccaaggtcggaggattgcttgagtccaggagtttgagagcagcctgggcaacatggtgaaagctagtctccactaaaaatactaaacattagtgggtcatggtggtgcatgcctgtggtctcacctactcaggaggctcaggtgggaggatcacctgcgactcagaggtggagcccgcagtcagctaaaatcacgccactgcactccagtgtggaccatcggagtgagacgctgtctcagtaaaataaatcagtaaataagacaaatagaaaaattaaaaatgaaaaaaggaggaaactgttttatttttcctagtagatcttgaaactctcacatcatgtcctacaatctcccttcttgcagaacacagaacccattccctgtggagctggttgggtggattgaaagtggggctgccctgagatatgtgtgtggttgcgatgtagaagccttcccagcaccctgtgatgacttacgggcacctcacttccctctggccccaaattcaaaacatccaatctcatggcaggttcatgcacccttttcccttcccctctctccaacacacacccacacatcccacaggcaggtcaccccgcaggcgtccccagcacatagcaaagctcacccgctctctcctgcgtggtcgctcttggattcggtgcaggaatcactggggcttcttgggcgccgggaacctttcatggtgaaaatttccagggttctccaagtcagccactgccagtgtttgtctgtctcctgcaaagatttcttcttggctcccgaatcctttagttcctttgagagagtggtgtcagccccaaagctgctcccgaaggcttgggttgtgtagcgacggggctgtggccagcggcaggtggatgaggctctgacaactgagctcttgggggaatcttgtacactgtcagcagggggtggagccaggggatttgtcagcaggaactgatgtgattggctgttcctggtatgacaacgggaggggccctcatggaggattggggcgtaactcaatccatagatgaccgatcaacagaacctgcctaatcccatcaagagtcaacctgtttcctgtcccctcccatcctctaggtcttgcctaataatgatagacactttctgtaatacccaattcatccatcgctgaaatagtttttcatgtgtgccttttatattttcatgcaataaaaatatgttaactttcacggtggctatcctggggaatgttatgtacacgaaatgaagtgtcaaaggagcagaagcagaaggaaattcacaagcttccctgagagtctctgcttgaattcctgccatgtttcctaaatatgttggcttcctacttcctacccaagtaagaaggtgcttcagaagatcaatcttaggacatttgacaaacgctactgagaatttcaggatgacaggaaggaacctttgattggatttgtggatgtgcctgtgaaagcgtgtgtgtgtgtgtgtgtgtgtgtgtgtgtgtgcgtgtgaagccaggatgaagtggctgttcctggggtggagacccttctttctcttgagaatgtccattgctgttgactcattgtgggttttggagatattttctctctttctttcgttctttctgacattttttgctttctccctccctcgatcctaaccccactccatccccccctcctcactccctccctccctctttccatccttcctccctcccttccctctttccttccttcctgccttcttcctttccccttcccctcttccttccgtccttccttcctgtgtgtaaaagaaaaattggtgaatagaagaataattgaataactgcctgagtcacttatacatttctcatctcactctggggacacagaagaccgtgttgtactcatctcctcgattttaaaaacagtcattctaaaatcaaggattctagatgtatcacttctaggcgaaatcttgaaagagaatgtgtaagagtttcatgtgctcttcatctctgtgatcacaattgaagaaggcatgagtttgagacgctgcatcaccaagatcgtggtgattccattgtcattacccttgtaacttgtgagcatccttactgccagcaatcattattagatatggaatctgatataggagttcatatttgctgtatgaatatcttgttctgggagtggtggctcatgcctgtcatcccagtgctttgggaggcagaggcaggaggctcgcttgagcccaggagttcgagacaagccgggacagcatagccagaccctcgtctctacaaaaatgtaaaaatcagccaagtgtgctggtaggtgcctgtaatctcagctacttaggaggctgaagtgttaggatcgcttgcgcccgggatgtcaaggctacagggagccgagatcgtgccactgaacttcagtctgggcaacagagcaagactctctctcaaaaataaaatactttttcctttaggcttaaattctaacactcaaacctccaatgtggcggtattaggaggtggggcccttgggagataatgagattatgaaagtggaaccctcgtaaatgggattagtgcccctctgaaagtgaccgaagagagctcgccagcaccttccatgtggggagacagggaggatatgacagtctccaacctggaagagggtcctcaccagaccccgatcatgctggcaccctcatcttcgacttccggcctccagaactctgatcaacaaatgtgtattcttaaagaaaaaaaaagtgtggaaagcaatgttaatgttcccaatcactttgagtacattctttccttaactatgtcttaatgcatagttgtcttggatggcctagtttgtaatattagtatatgcatatcagtgaattaataaatacagcagtgaagaatactgttctcgttggcaatggtggctctcgcctgtaatcccagcacaatgggtgggcaagtcgtgtcaatcatctgaagtcgggggttggagatcatcctgaccaacatggagaaatcccgactctactaaaaataccaatctgcctgtcatagtggcacgtgtctttaatcccagctacttcggaggctgaggcaggggaatcacttgaacctaggaggtagaggttgtggtgagctgagatcgtgtgcgtgcagtctatcctaggcaacaaaagctaaactctatctgaataaagaaaaaaaaaatgtaatggtgtttgttgaccatttgttcagctagtcttggtgcttccttgtgggccaggagagccctgctgcagcccccattcattccagtagacatggcagaagagtgattctcactttctgctatagcctcttcatccattggttgaaatgatttttttatatgtcttataaatgtttccacattaaaaaacgaattgaattttatagtgacgcttttggggattgttacccataatttgtttgaactcctaaaacatggaagtatgccaagcacagtggcttatgcctgtaatcccagcgctttgggtgggcggatgacctgatgtcaggagttcacgaccagcctgaccaatgtgggagaaatcctaactctactaaaaatacaaaaattagccgacgatggtggtgtgtacctgtattcccagctacttgggaggctgagacaggaaaattgcttgaacccaagaggcaaaagttgcagtgagctgagatggtgccatttcactccagactgtatgacagagggagattccatcttaaaaaaataaaaaaaggaattaaagggaaatatataagatgttgtgagagagtttctaattgtgattcctccataattgtccaaacagaccacctctgggggtctattcacaagagactctttagaagtggaaactcatgcatttgggaaacgctgggggaaatctgaagatgacctatggtgggggtataaatggattcgtacgtgtgttttttgattgtgtgagtgtgtgtgtgtgtgtgtgtgctgtcatctgtggagtgggggatcctcttttgccttgagaaagctcatctctgtccacttactctgggctctaccatctgtgccttgtatccagtagaaataaaacagtttgcggcagaaatggagttttattttattttactttactttttattaggattatttgtagaccgggtctcactctgtcactcaggctggagtgcaatggcacgatctcagatcactgcaacctgtgcctcctgcactgaagccatcctcccacctcagcctctggagtggggagatcccacacctgtgtaatttttgcatttgttctagagatggggtttcctcatgctgcccgggctggtctccaactcccgggctcaagcgatccacccgcttcagcctcctaaagtgctgggattacaggtgtgagctactgtgcgtggccagaaatggagattttcttttttttctccttttttttttttgaggcggagtcttgcactgttgcccaggctggagtgcagtggagtgacattggcgccctgcaagctctgcctcctcggttcacgccattctcctgaggggagggagggagggagggaaagaagaaagggagggagggaggaagggaggagaaaatgtccgaaggaaagaaagaaagaaagaaagagaaagaaagaaggaaagaaagaaagaaagagagagagaaaatgttcacaaaacccacaatgagttaccagcaatgaactttctccagacaaagaagggtctgcaccccaggaacagacacttcttcctggctacacacacacacacacacacacacacacacacacacacacacacacacacacgctttcataggcaatccagatatccagtcaaagattccttatttatttccctttacttcctttttttttttttttttgagacaaaatctccctctgtcttcgaggctggagtgcagtggcaccatctcagctcactgcaacttctgcctcctgggttcaagcaattgtcttgtctcagcctcccaagtagctgggactacaggtgcacaccaccatggttggctaatttttatatttttagtagagttggggttttcccacattggtcaggctggtcttgaactcctgacatcaggtgatccgcccgcctcagcctcccaaagtgctgggattacaagcatgagccactgtgctcggcatacttccattttttaggagttcaaacaaattatgggtaatgatccccaaaagagtcactataaaattcaattctttttttactatggaaacatttataagacactttaaaaaaatcatttcagccaatggataaagaggctatagcagagagtgagaatcactcttatgccatgtctactggaatgggttgggggtggggcagcgctctcctggctcaccaggaagcaccaagtctagctgatcaaatggtcaacaaacagcattctttttttttttttttttaattttttgagattcagtttagcgtttgttgcccaggctggagtgcaatggcgcgatctcggctcaccacaacctctgcctcccaggttcaagtgattctcctgcctcagcctcccgagcagtgggattaaaggcatgtgccactatggcagactgatttgtatttttagtagagtcgggatttctccatgttggtcaggctgatctccaactcccgactacaggtgattgaccagccttggccttccattgtgctgggattacaggcgtgagccaccattcccaacctgaacagtattctttattgctgtatttattaattcactaacatgcatattctaacattacaaactaggccatacaacacaactatgcattaagacatagttaaagaaagaatgtactcaaagtgattgggaacattaacactgctttccacgctttttttttttttaagaacagacatttgtttatcccagttctggaggctggaagtccaagatgagggtgccagcatgatcggggtctggtgaggaccctcttccaggttggagactgtcatatcctccctgtctcctcacatggaaggtgccggcgagctctcttctgtcactttcagaagggcactaatcccatctatgagggctccaccttcataacgtcatcatctccaaaaggccccagctcctaataccttcacattggaggtttgagggttagaatttaagcctaaagaataaaacattttatttttgagacagtcttgctctgttgcccaggctgaagttcagtggcacgatcttggctctctgtagccttgacatcccaggctcaagggatcctcccacttcagcctcccaaatagctgagactacaggcacctaccaccacacttggctgatttttaaattttttgttgagatggggtctcgctaaattgtcctggctggtctcgaactcttgggctcttgggctcaagtgagcctcctgcctctgcctcccaaagcactgggattacaggcatgagccaccactcccagaccaagatattcataccgtaaatatgaactcctatctcacatttgatatctaataatgattgctggcagtaaggatgctcacaagttacaagggtaatgataatggaatcaccacgatcttggtgatgcagcatctcaaactcatgccttcttcaattgtgatcacagagatgaagagcacatgaaactcttacacgttttctttcacgatttggcctagaagtgatacatctagtctccttgattttagaatgactgtttttaaaatcaaggagatgagtccaacacggtcttccgtgtgcccagaatgagttgagaactgtataaatgtctgaggcagttattcaattattcttctattcaccatttttttttgacacagtctcactctggcacccaggctggagtgcagtggtaaaatcttgactctctgccacctccacgtcccagcctcaagcgattctcgtgcctcagccacccaagtaactgggattacaggcgtgctccaccacacccagctaatttttgtatttttagtagagacgcggtttcgccaagttgcccaggctcgttttgaactcctgagctcagacgatctgtctgcctgggcctcccaaagtgctggaattacaggtgtgagccactgcgccaggcctgtttttgtaattttttttagagacaaggtctcactttgtggcccttactgctctgcatagtggttgaactaagcaacacagtacaagcgttctcttttctccacatccttaccagcatgtattattgtctgtcttttggatgtaagctaactggggtaaggtgatatctcctcatagttttgacttgcatttctctgatgatcaatgatgttgagcaccttttcataagcctgtttaccatttgtatatcttcttttgaaaaacgtctattcagaggccaggcgtggtgtctcatgcctgtaatcccagcactttgggaagccaaggtgggcggatcttctgaggtcaggagtttgagaccagcctggccaacgtgatgaaaccctgtgtctactaaaagtacaaaaactagctgggcgtggtggcggatgcctgtaatcccatctacttgggaggctgaggcaggagaatcgcttgtacctgggaggcggaggttgcagtgagctgagatcgtgccattgctctccagtctgggtgacagagtgagactctgtctaaaaataaaaaaataaaaaaataatctattcctgtcttttgcccattttcaaaatcaaattattagattttgtcctattgggtcaagcactgtgtctcacgcctgtaatgccagcactttggggggatgaggtgggaggattacctggggtcgggcgttcgagaccaggctggctaatatggtgaaatcctgtatctactaaaaatacacagattagtcaggcgtggtggcaggcacctgtactgccagctcctcaggaggctgaggccggagaattgcttgaacctgagaggtggaggttggggtgagctgagattgttccactgcactccagactgggcaatagactctgtctcagaaaaaaaaaaaaaaaggttgtgtgctattgagatgtttgagctccttttgtattttgaatcaatttctatattttacttatcacctgatagacacgctaaatgtgcatattttgatcaaatatctaagttgcacatgatttagtttctgttttcttcttgcttcctcagagttttgttagctttataatgtttaaatattagcttgatgatatattaatatttctaatatattgaggagttttcctaattcaaaagttagtcgagcaaaattctcttacgcatgtataatctattgttcacaggcctctaattaaatcgtcattgttaaactgttttgaaattctatctttatcacacattaggttttcaggagagaaatggttctaaaaacaaatgttcctccatcgatttactgtttttttttttttttttgagacggagtttcactctagttgcccaggctggagtgcagtggcgcgatctcggctcactgcaacctgcgcctcctgggttcaagcgattctcctgcctcagcctcccgagtagctgggattacaggtatgagccaccgtgcccaaccatctcaggtttttctgagcttggatccagtgtgttactttctagtgtcccgcacactacagtcccttccctgggatatgtggtgacccttccaagtcctcattattttcaacaaacttccttctcagctgtctcctttgtgaggcttttgggtctgtctgcttcttgcctaacccaatatcccctagccccaggcagatgctggtagtttgtgtctttcaatccttcagtagacactatccttgcctggaaagtcatgctagagttaactttaaaactaattgttacattactagccaggcatggcagctcacacctgtaatcccagcactttgggaggtcaaggcaggcagatcacttgaggccaccaggagttcgagaccagcctgaccagcatagtgaaacctcatctctactaaaaatacaaaaattagccgggtgtggtggcacacacctgtaatcccagctacttgggaagctgaggcaggtgaatcacttgaacctgggaggtggaggttgcagtgaaccgagatcatgccactgcactgtggcctgagtgacaagagtgagactctgtctcaaaaaacaaaaacaaaaacaaaaaaccaaaaagagatctatgttctatttgagataatggaaaaagggattttactgaccacacacaacaaggaatatagtctttctaaaaatagttggaaaagtcactgaacaaatggaaaaggggagcccaaagcaagccacaacaacaaaacctggggaagggggagaatccccctacaaatactttaacacaactatcttaaatatgttcaaagagctaagcaggcatgtccaagggagagaacatagtcatgtgtttttgtttctgtttctggttgggccagtaaagccccatcctcatccctcttttctgcttatcactagagacagaaactagaaaccatggattcaggctgctaaaagccaaaaacgaaagagaacaccatcaccaaaataaggcaggtcagacaagcttgaaagaaaacccttgacaaagatgtctcaatgacagagcaggtgcattgccatcttggacaaacaccactattttaagttccctttgattaaaaatcgcctaaatccagcccctaaaacatgagtctaatggctaatctcagcttgaccataaaccataaatgacacctttgaccagaaacattccaatgctgagataaactctcctccactcagaaaacattctgaacctgtgataagctctccctcactaaacttttctttttgagatggaatcttgctctgctgcccaggctggagtgcagtggcgtgatctcgcatcactgcaacctccgcttcccaggttcaagcgattctcctgcctcagcctcctgagtagatgggattacaggcacgtgccaccatgcctggctaatttttctatgtttatttttatttatttatttaattattattattttttcaaataaatttttttattattatactttaagttttagggtacatgtgcacaatgtgcaggttagttacatatgtgtacatgtgccatgctggtgtgctgcacccattaactcgtcatttagcattaggtatatctcctaatgctatccctccccactccccccatcccgcaacagtccccagagtgtgatattccccttcctgtgtccatgtgttctcattgttcaattcccatctatgagtgagaacatgcggtgtttggttttttgtccttgtgatagtttactgagaatgatgatttccaatttcatccatgtccctacaaaggacatgaactcatcattttttatggctgcatagtattccatggtgtatatgtgccacattttcttaatccagtctatcattgttggacatttgggttggttccaagtctttgctattgtgaatagtgccccaataaacatacgtgtgcatgtgtctttatagcagcatgatttatagtcctttgggtatatactcagtaatgggatggctgggtcaaatggtatttctagttctagatccctgaggaactgccacactgacttccacaatggttgaactagtttacagtcccaccaacagtgtgaaagtgttcctatttctccacatcctctccagcacctgttgtttcctgactttttaatgattgccattctaactagtgtgagatggtatctcattgtggttttgatttgcatttctctgatagccagtgatggtgagcattttttcatgtgttttttggctgcataaatgtcttcttttgagaagtgtctgttcatgtccttctcccactttttgttggggttgtttgctttttccttgtaaatgtgtttgagttcattgtagattctggatattagccctttgtcagatgagtaggttgtgaaaattttctcccattttataggttgcctgttcactccaatggtagtttcttttgctgtgcagaagctctttagtttaattagatcccatttgtcaattttggcttttgttgccattgcttttggtgttttagacatgaagtccttgctcatgcctatgtcctaaatggtaatgcctaggttttcttctagggtttttatggttttaggtctaacgtttaagtctttaatccatcttgaattaatttttgtataaggtgtaaggaagggatccagtttcagctttctacatatggctagccagttttcccagcaccatttattaaacagggaatcctttccccattgcttgtttttctcagatttgtcaaagatcagatagttgtagatatgtggtgttatttctgagggctctgttctgttccattgatctatatctctgttttggtaccagtaccatgctgttttggttgctgtagccttgtagtatagtttgaagtcaggtagcatgatgcctccagctttgttcttttggcttaggattgacttggcgatgtgggctcttttttggttccatgtgaactttaaagtagttttttccaattttgtgaagaaagtcatcagtatcttgatggggatggcattgaatctataaattaccctgggcagtatggccattttcacgatattgattcttcctacccatgagcatggaatgttcttccatttgtttgtatcctcttttatttcattgagcagtggtttgtagttctccttgaagaggtccttcacgtcccttgtaagttgcattcctaggtattttattctctttgaagcaattatgaatgggagttcacttatgatttggctctgtgtttgtctgttattggtgtataagaatgcttgtgatttttgtacattgattttgtatcctgagactttgctgaagttgcttatcagcttaaggagattttgggctgagacaatggggttttctagatatacaatcatgtcgtctgcaaacagggacaatttgacttcctgttttcctaactgaataccctttatttccttctcctgcctaattgccctggccagaacttccaacactatgttgaataggagtggtgagagagggcatccctgtcttgtgccagttttcaaagggaatgtttccagtttttgcccattcagtatgatattggctgtgggtttgtcatagatagctcttagtattttgagatatgtcccatcaatacctaatttattgagagtttttagcatgaagggttgttgaattttgtcaaaggccttttctgcatctattgagataatcatgtggtttttgtctttggttctgtttatatgctggattacatttattgatttgtgtatattgaaccagccttgcatcccagggatgaagcccacttgatcatggtggataagctttttgatgtgctgctggattcggtttgccagtattttattgaggattttcgcatcaatgttcatcaaggatattggtctaaaattctcttttttggttgtgtctctgcccggctttggtatcaggatgatgctggcctcataaaacgagttagggaggattccctctttttctattgattggaatagtttcagaaggaatggtaccagttcctccttgtacctctggtagaattcggctgtgaatccatctggtcctggaatctttttggttggtaagctattgattattgccacagtttcagctcctgttattggtctattcagagattcaacttcttcctggtttagtcttgggagagtgtatgtgtcgaggaatttatccatttcttctagattttctagtttatttgcatagaggtgtttgtagtattctctcatggtagtttgtatttctgtgggatcggtggtgatatcccctttatcattttttattgtgtctatttgattcttctctctttttttctttattagtcttgctagtggtctatcaattttgttgatcctttcaaaaaaccagctcctggattcactaattttttgaagggtttttttggtctctatttccttcagttctgatctgattttagttatttcttgccttctgctagcttttgaatgtgtttgctcttgcttttctagttcttttaattgtgatgttagggtgtccattttggatctttcctgctttctcttgtgggcatttagtgctataaatttccctctacacactgctttgaatgtgtcccagagattctggtatattgtgtctttgttctcattggtttcaaagaacatctttatttctgccttcatttcattatgtacccagtagtcattcaggagcaggttgttcagtttccatgtagttgagcagttttgagtgggtttcttaatcctgagttctagtttgattgcactgtggtctgagagacagtttgttataatttctgttcttttacatttgctgaggagagctttacttccaactatgtggtcaattttggaataggtgttgtgtggtgctgaaaaaaatgtacattctgttgatttggggtggagagttctgtagatgtctattaggtctgcttggtgtagagctgagttcaattcctgggtatccttgttaactttctgtctcattgatctgtctaatgttgacagtggggtgttaaagtctcccattattattgtgtgggagtctaagtctttttgtaggtcactcaggacttgctttatgaatctgggtgctcctgtattgggggcatatatatttaggatagttagctcttcttgttgaattgatccctttaccattatgtaatggccttctttgtctctttcgatctttgttggtttaaagtctgttttatcagagactaggattacaacccctgcctttttttgttttccatttgcttggtagatcttcctccatccttttattttgagcctatgtgtgtctctgcacgtgagatgggtttcctgaatacagcacactgatgggtcttgactctttatccaatttgccagtctgtgtcttttaattggagcatttagtccatttacatttaaagttaatattgttatatgtgaatttgatcctgtcattatgatgttagctggttattttgctcgttagttgatgcagtttcttcctagtcttgatggtctttacattttggcatgattttgcaggggctggttccagttgttcctttccacgtttagtgcttccttcagggacttttttagggcaggcctggtggtgacaaaatctctcagcatttgcttgcttgtaaagtattttatttctccttcacttatgaagtttagtttggctggatatgaaattctgggttgaaaattcttttctttaagaatgttgaatattggcccccactctcttctggcttgtagagtttctgctgagagatccgctgttagtctgatgggcttccctttgtgagtaacccgacctttctctctggctgcccttaacattttttccttcatttcaactttggtcaatctgacaattatgtgtcttggagttgctcttcttgaggaatatctttgtggcattctctgcatttcctgaatctgaatgttggcctgccttgctagattggggaagttctcctggataatatcctgcagagtgttttccaacttggttccattctccctgtcactttcaggtacactgatcagatgcagatttggtcttttcacatagtcccatatttcttggaggctttgttcatttctttttattcttttttctctaaacttcccttctcacttcatttcattcatttcatcttccatcactgctaccctttcttccagttgattgcatcggctcctgaggcttctgcattcttcacgtagttcttgagccttggctttcaactccatcagctcctttaagcacttctctgtattggttattctagttatacattcgtctaaatttttttcaaagttttcaacttctttgcctttggtttgaatttcctcctgtagctcggagtagtttgatcgtctgaagacttcttctctcaactcgtcaaagtcattctccgtccagctttgttccgttgctggtgacgaactgcattcctttggaggagaggcgctctgctttttagagtttcagtttttctgctctgttttttccccatctttgtggttttatctacttttggtctttgatgatggtgatgtgcagatgggtttttggtgtggatgtcctttctgtttgttagttttccttctaacagacaggaccctcagctgcaggtctgttggagtttgctcgaggtccactccagaccctgtttgcctgggtatcagcagccgtgtctgcagaaccgcggattttcatgaaccacgaatgctgctgtctgatcgttcctctggaagttttgtctcagataagtacccggccgtgtgaggtgtcagtctgcccctactggggggtgcctcccagttaggctgctcaggggtcaggggtcagggacccacttgaggaggcagtctgcctgttctcagatctccagctgcatgctgggagaaccactgctccttcagagctgtcagacagggacatttaagtctgcagaggttactgctgtctttttgtttgtctgtgccctgcccccagaggtggagcctacagaggcaggcaggcctacttgagctgtggtgggctccacccagttcgagcttcctggctgctttgtttacctaagtgagcctgagcaatgcgggcacccttcccccagcctcgctgctgccttgcagtttaatctcagactgctgtgctagcaatcagcaagactccatgggcataggaccctccgagccaggtgcgggatacaatctcctggtgtgccgtttcctaagcccatcggaaaagcgcagtatttgggtgggagtgacccaattttccaggtgctgtctgtcaccctttccttgaccaggaaagggaactccctgaccccttgcacttcccgagtgaggcaatgccttgccctgcttcagctcgcacacggcgcactgcacccactgtcctgcgcccactgtctggcactccctagtgagatgcacccagtacctcagatggaaatgcagaaatcacccatcttctgtgtcgctcactctgggagctgtagactggagctgttcctatttggccatcttggctcctccctcctaatttttctatttttagtagagacagggtttcaccatgttggtcaggctagtctcgaactcctgacctcgtgattcacctgcctcggcctcccaaagtgctgggattacaggcatgagccaccgtgcccagcccctaaactcttaaatagttttagtctgtaagagagaatactcctgacctaaattggccagaagcccctctcaggtttattcccaaaataaacctgtctttgactgttgagctgcttttcctgtttctttcttcaactcttacactcaacatatagagaacatcaagagtatcaataaagagatagaaattacgaaaaggaactgaatagaacttgaaccatatccctgtattttccctgtccaactccccctaagcaaccactaatctactttccatctgtatagatttatctatttttgacatttcatagaaatggaattacatatagttggtcttttgtgagtagcgtctttcccttagcacaaggttttcattcatgtagacacatccttcccacctctgtggctgaataatacacaatgtatgaatatatcacattaaaaacactcatttataaattgatgggcatttgggttgttctggtccattttttgctggtccaagcttcaccttcagatcagttacctgtcttttttttttttttttttttttttgagacaggatcttgctccacagaacaaatcacagctcaatgcagccttgacttcctgggctcaagcaatctcctgcctcagctttttgagtagctgaaactacaggcacatgccaccatgcccagctaatttttttttggtagagatggggtcttactatgttgcccaggcttgtcttgaactcctgatctcaagtgatcctcctgccttggcctcccaaagcactggccttaaggtgtgagctacagttcccatcctattattaaatattttcaaacagggagataatttgaaataattttacaagtgagcatccacttatagactgaattgtccccatcccctcaccccccaaattaatatgctggagccctaaccccagtacctcagaatgggactctatgtgtaagatcaggcttttttttttttttttttttttttttttttttttttgagatggagtctcactctgtcaccaggctggagtgcagtggtgcgatcttagctcactgcaacctccgcctcccaggttcaagcgatctcctgccttagcctctgagtagctgtgactacaggaacgtgccaccatccccaggtaatttttgtatttttagtacagacagggtttcaccatgttggccaggatggtctcaatctcttgacctcatgatccgcccacgttggcctcccaaagtgctgggattacaggcatgaaccaccgtacccggccaagatcaggcttttaaagaggcaattaagtaagttaaaatgaggcttttagggtgtgccctaatccagtttggctggtgtttttataaggaaattaggacataatagaccaagaagcattgtggtgcacagacagaaggggcagcaagggggtagccatctgcaagccatgcagagacctcaggagaaaccaaccttgccagccccttgatcttggacttccagcctccaggactgtgggaaaataaatttctactttttatttatttattttctttgaaatggagtctcactctgttgcccaggctggagtgcaatggtgcgatcttggcttaccgcaacttctgcctcccaggttcaagtgattctcttgcctcagactcccaagtaggtgggactacaggcatgcaccaccatgcccacacgatttttgtatttttagtaaagacggggttttgctatgttggccacgctggtctagaactcctgacctcaaatgatccaccaccctcggcctcccaaagtgctggattacaggtgtgagccactgggcctggcccaaatttctacttttcaccagcaagtctgtggtattttatagtagccctaccaaactaatataatctaccatctagattccatcagtgatactttattatacttgcctgaccacattgatctctgtatcattcatcaacccatctttatttttattttttttttgcattttgaagtagtttgcagacagcaatagatttctcccctaaacatttttaacatacatatcattaattagagttcaaaatttggggctggaagatctctttccaaggtggctcatcttctgcctagcaatgtggtgctggaaagttggtcctttgccacggcgctgcttgagtgtcctcatggcatggtggatggctttctccagggagggagcaattgaagaaaccgaggaagcttcagtgtgtcttatgacctggcctgagatgccacacatggtcacttcagcagcagcactgtattgattatatgggtcatctgattaaatattggggtgtgtgtggggtgctacacaggacaggaatctcaggtggcaaggatccttggtgagcatcttgaaggctagcgaacacatccacctttcctccagaccacctcatcagcccagaaatccccaccccctgttatcttttttttctgctgtagagcctggtttcattgtagctgtctggggcctctggcatttttatggctgtgtttgggataagttgcaaggtttcctttcccctttctcccctctctgttcttctcagcctcacccccagcttcacccttccttttcctctcagggcctttctgagcagttgatgctctgagggtcagctgggaatgcagcctataagagcggtctgctgggtgcagaaaatgttgggggaaggtttgcttcctgggctcctgtcacctcctgtattatgggagcttgggggcatatgctggcatgttgggactactgttgtcttccatgttctaacattccctgggaaaggagacacttggtttgatggggctctacgtatctgctatcaggtggggacagacatctgcattgcaagagcaagctgaagagttgcctactagggctcagctggtttcttgtgtttggaataaagagggctcactgaaggggcagtcatcttatgttagggaagacttgagggactcacactgtgggctctcctcatttatgttgagagtgttgcttcctgatgcttctgtcaactcttattttgtaataatcgaatgagaggtagaacctggcgggttgcctgttgagattctcatgattgtattgggggaaggctgtggtatccttgctggggatatttgtgtctgctcttggggagacaagggaggcaagctagggtttgtgttgagtgagagtgttgtggaatttggagctttctttagtatgtaggggattggaaattgcctttttgggtttccttcatctaatgttagaggaatataggggggtcacttgaagttctcatctgatggaatcctcattgtgttgaggggtgtaactaagaggctggaggtacgagctcctgttttttagggcctggaggatcactacctttgactcccattttttaaatattggggagtcagggaagtgtacctggatggaggtcccattgtcttagtttgggaagaagatgggttgttattctgtgggggtccacttatctctgtccagtgggtttggaagggtctcttttaacctattttatctagtgttgagggggttactagagtcactttctgggtcttccttattattggtatagatgaggtaggtcactgggcttgggatcctcattctttagtgctgaggggcagctgaggaagtcacttgtgggattgctgtcatttcaagtatcagacataactggaggtgcttattgaaatttccatcagttctagttttgggaggatggatgtcttgctttctcagtatcttttgtgtttggggatgacacctgctaactgaggtcttgttgcctctagttttggaggggcctgatgaccccttactaggacttctatcatctctattgttggatgcagactatacgcaccacttgttgggccttccataatcactagtcttgtgtgtttgtgtgtgttgggggagaaatctcctgcagtgctttccaccacctctagtttggggagatcaatgcaatgtgtttttaaaagcattttattttggaaagtttagatatacataaaagttgtaaaactatacagggttgttttatacagtcagtactgatttatatttacttgcatcttatgtttcctgttgatcttaattcctggaattatgtatgtctctatggaatcattttcctgaagcctgaagaaatctcttcagtgtttctgaaaatacggttatgctgttaattctctcagcttaaaaaaatccctcccaggccgggcgtggtggctcacgcctgtaatcccagcactttgggagaccgaggtgggcaaatcatgtgaggtcaaaggatcgagaccatcctggccaacatggtgaaaccctgtctccactaaaaatacaaaaattagctgggcgtggtagcacacacctgtagtcccagctactcaggaggctgaggcaggagaatcacttgaacccaggaggaggaggttgcagtgagccgagatcatgccactgcactccagcatggcgacagagtgagactccatctcaaaaaaaaaaaaaaaaatattccctcccattggaaaacattgttgccttcagttttgaagaatattttcttaggttacagaacttttgattgacaatttccccctcctccaacccatttaaccctttatatgtcagatgtcattcattgtcttcttgcttccatagtttcttttgaaaagtcatcattagtcttactgatgctgctttgaaagcaatgtgtccttcttctttggttgtttggtagatttgcagtttgtctctcattttctatggtttgtccatgtttcctccatttcccttaacatattattcttggttattttaaagtctttgtctgctaactccaatacccaaattgtctctggatctgctattgatttatatattcataaatggggatattttcctgtctcaatggatgaaggagagtgaggtctgaccctggctatttcctgcaggaggacctggggctggatgctatcgctgactgacctctctcagctcctggaatgcagccctctcctctcgtctccagattcagttgctccctcccttcgtcccttcaggctgtgaggtgttagagctctgccctgctaagctgctgggtgctttacaactttttgtggtttccctggatcctgtccacaggactgagtagaccctttatgaaaactctacttgaattgtcctagtctgtgggtgtcaacctgagttcctgctgggaccctgactgatgtgccaactcactgaaataaggaaaagtcctaacaatgtctcagaaaacccaacaagatcaggatctaccatgtctctgaccacatcatcttttactgctccctcatcacccctttgttccactccagctgtattggcctccttgttgtgggcctttgcatgccaacactactcttgcaagacaaattcatatgactcactgtcccaacttgttgagatctccgctcaaatgctccttaccaagaggctttcttttcctagttatataaaattattattcccaaccccccttaactctcctaaaatgcttttttttcctataactctataataccatattttcttgatttttctataatctgttcctcctccattaggtgaagtatttcaatggcaaaactttgcctggcacacagaacatactccgttaatagggtagtggttaagtgcatggactgtctgggttcagatcttggctctaccatttaccagtcagtgaatgcaggcaagtaacttaagtgtatcataccagttttctcatctgtaaactggggataataacattacatacttaagtttataatgcatactgagttaatacttatatgtcatttagaagggggcctgatctatgggaagtgcaatataaatgtctgaccatcaggagttcgagactagcctggccaacatggtgaaaccccatctctactaaaaatataaaaaaattacctgggcgtggtggcaggtgcctgtaatcccagctactcaggaggctgaggcaggagaattgctggaacctgggaggccaaggttgcagtgagccgagatcgcaccattgcactccacccttgatgacaagagtgaaactccatctaaaataaataaataaataaataaatgtttgaccatttattattaatgcattacaatactttgctatgtaaaaatatcatctccacataaaaaggaatacagaatacctaatcctgtatgcatctagttacataatgtcaaaatatataaaaatgacaaaattacagtgttaatacataaacataatggaagagtttaccacacctctatcactaaataaggttagaaaaagaaatctgaacatacgtactgtacttggaaatacaattaagttgcattaatgttcatataccctatatccaaatattagagaatatacattgttttcaaagaaacaacatgggtaaaacttgaccaatttataggtttaccagttagattctgcatcctgctggaagttaacagaacaccacctcaaaaacaaacaacagatcatgttggcttcaatcagttaggggtttctttttttaaaaatatttatttgtttattttgagatggagtctcgctctgttgccaggctggagtgcactggcgccatcttggctcactgcaacctctacctcccaggttcaggcaattctcctgtctcagtttcccgagtagctgggaatacaggtgtgcaccaccacacccagctaatctttatacttttagtagagatagggtttcaccacgttggccaggatggtctcaatctgttgacctcatgatccacccacctcagcctctcaaaagtgctgggattaaaggcgtgagccaccacacccagcctaggggtttcttttagtcacataagaagtataagaataaggagtccagagcagatgcagccaatcggaggctcctggagagcccaaagcattgtgatttttggctgcactttggtttctgtcattgtggtcaaaaagaagctcttcaaactctagaccttgaggccactttccaagagacagaatgggtgaggtgaatggaaaatatgtgaggagaacaagccaggagatgttccacacagtgacttcgacttacttctcattgccaggggagtgcgaaaaaacccgcctgggcttcaggaaaaactataagattgagaactttcgatattgttcacagacaacttgaacaacatgtttgtttctttaaacgaataaactgaagagaacggacactgggaaagaaaccaacagtatttggcataccaagatagagagaaaataatcagtatcataaagctcatgtactctgccaaaaataccactacattagaaaaatgtgtttataaatactaatttccattatgataaactgaatcactcagaaggtatttggaaataactttttgaatatgcaatgtgtggatgtctttaacaagcaaattaattataataaatacattgcattaaaattatgaaatatgttaatgtttattttagggaacagctatacacaaatgtttatattaaaagaaaaaaagactaaaaaaattaatgagccagcagtccaatctacagatgagacactgataaaggatatcccacactcaaaacagtgattatactttttgttcccagtgaaaattgtggccactcagtgaagagttcaggctgaggcatcctaacactgattacattcctaggggtttctccatataagttctctcatatacaagaaagagaagaatcactgaaaaattttccaatattaatatactcataggttttgcatccagggagaagttccatattttccctaacacagaggcatcactgaaggctttctcttcttctttatatttcaagtttctctgtagtgtgaatgctcacaagtttcctaacaaatgtagaaaaacagaaagctctccaatattgatgatgttcaatggggcattctctccagaattaattctcaagtcccttaaaaaccgatagaacattcaaggctttcccatagtcactgcagaataccacactatagtttgctcagtaatgtgaacacttttgctgtagggtattccgcatttctgagtgttgttccattgtgtgatttccagtgcgtcttaagggatgactgtcactgaagccttctgagaccttcacaggttttctcccttagtgtgagctgtcacatgaatccctgctgatagcactgaaggctttctacagctgttccattcttcaggattctctcagtacataatcttctgggcccatgaaggtgagaattcgagctgagagctttaccatacagattgtcctcaaaaggtttctcttcagagtgaattaataggagttactgaatgctatttcatattgattagagtagaaggatgatgtgctgagggcttttcttcattaattccatggcaaatttcccagatgcttctgagttatctgtttcctggtattcataccttctgcagtctctcacattgtatcaggattggtgtgttgtgagaccaacacaataggaaataagtgaaagcttagcagtcctcctgaggataggtcataaaagccattttggcctctgtattggtcctctcttggatcactaaccttggcgagaacttattgccaaattgtcaaggagctgggccttgtaaagaggcctacatggtaatgactgaaggtcccctgacaacaaccaacatcaactttccaggcatgtgaataagtcatcttggaagtggactgttcatcagtaaagatgttagatgactatagctttggctgacatcttgattgtaagtaaaggcatgagagatcctgcagtgtaactacagagataagctgttcttgaattcctgatctgtagaaattgttagagaataaacatttcgtgtttgaagccacaaaatttgcggggatcatttgttatgctgcaacaaataacttatatatccagtgtgagctctctcaaactatcttagggatgaaagatcaatgagtgctttcctccagaagttcctgcagtaattcatatccatctattatgtattctcttgtgcacagaaagataggagttacttgtgaaggatttcccacaatgattacattcatagggtttttctccagtgtgagttcttaagtgtttcttcacagctgagagattattaaaggcttttccacagtcactgcactcgtagggtttctctccggtatgtattctcttgtgcacagtaagagaaaagctactgctgaaggatttcccacactcgttacattcatagggtttttctccagtatgagttcttacgtgctgtgtcagataggagctcttcctgaaggttttcccacaatcgtgacattcataaggtttctcccctgtatgaatgctattgtgcccagtgagagaggaccttgtgctgaaagcttttccacactgattacattcatggtgattctcccccgtgtgaatcctcttgtggcttttgaggttacaactggtgcggaaaacgtgaaaacactggttacattcatagggtttttctccagtgtgaattctcaaatgcagtctaagggatgagggatcactaaatgctttcccacagtgattgcattcatagggtttctccccattatggattctcttatgaatagtaaggtaagatctgctactgaaggacttcccacattgactacagtcatagggtttttctccagtatgaattctcttgtgctgagttaggttagatttcgtgctgaagactttaaaacactgattacattcattgagtttcactccacgatgacttctttcctgtggattaagagatgaatgataactataatttataatatttgaaatacttaatgttctcctaggaatcttctctcccaggaattctgttacattattataattgatattttggctactttcagtggttgtatgtgatttctgcccagttttagctctaagaaagttaaaaaacatagatgctttgccacaagtccttatcagatgcacaaaacattttctgataacgtgtggatgaagttttgttccaacagtcaatatctgagccacagataggaaatatttacttgtgggaactctccgtgaagaaataagtttggagctaactcacacttctctaaatatttataattttcacagtgtctctccaggaacacagcattctcaattataaatgacactttcctttaatgcctctcctggttattttgtgccctttctaaacttaaggcattctcctactgtagaaaaccagaaatcacccatgttagtcttaccgtttttacacctttagactgttcttttctgaaaacattcttcttaggagttaaccatttggctttaagtagagtctccaaatctgaaacaaattgaaaagaaatttaggttgatggagaaaagaaatggaaaagtgtacacatgagtaaaggcagattctgagggatcagggtttttgaggatgtttgcaacaaagaggatttggttatgaaaattttaggtattaattttaaaaaaggattctagacaaattgagattgatcacagattgacaagaggagtgatcaggaatgcaaagtggaaaggaacttgactgaaattttcaaaagagttgcatctttgtttcttccctgagcccaaagtgaagtatgagatgatgacaagggagttagagagaaaagaaaggacatgaggaagctcacaccaaatgttctcgtgcatgtttgtcaggaacagggtattttacaaagttccctgattgacatgaactaatgtaatactcccaacccccaagtcactggccagagctattcctcacaagggctcatatccacctggtgctcacctggacaggtgcttggtagaattcctctttcctctgtcaccaccttcttgtcttgttccaactgggatatcagactgggtttattaacacgacaccctatttatggaaacaatacacatgatataggtaacagtgctggggacaaccaagtccatgaaagaaagccaacatttatgaagatggaaaagtgtgactttaggagcagtgaaataaattatgccttaattcttttcttttttttatttattttgagatggagtcttgctctgtcgcccgggttgaagtgcagtggcatgatctcggctcactgcaacctctgccttccaggttcaagcgattctcctgcctcagcctcccaagtagttgggactacaggtgcacacaaccacgcccggctaatttttgtatttttagtagagacggggtttcaccatattggccaggcaggtcttgatctcttgatctcctggcctcgtgatccacccaccttggcctcccaaagtgctgggattacaggcatgagccaccacgccctgccaattataccttaattctagtgcatatggtaactctcactgaacaaaaatgcaacaagcatattcaactagatattcagggtgatagggcataaacagccccagaaggccatgcctgagttcaaatgcacacttcagaggccccaaaacttttaaccatgaagaatataaagtcaggacaagaaatagatcttcagttcataaggcaggaattagagactgcccatgagggtgggaccatatggtcccattcatcactgtactcccaagtcactgcacagacctaggaacacagaggtgctcaagaaaacttgaaagaagtgatgacagtgacagtggtggaggacggaattccaaacgttcatccctccacaaaaacagtgagtaaactggcaaaagcggtccgaatcaactttatcggaattcttgaaatgtatcaaaagtccacagcaatcaggagaatgccttctcagaaaacccagctgaatctgggtaagagagctttatgatactttaaatggacctctttcccctgctttttctacaaccttgaagacaacagcctgcattcctagtacttgcagggagcagaacagaccttactctgtggttgctcttcctgacctgtctggtggttccctgaaggactggctcaaagggttgtctttatttatctaactccaaattctttcaggactgagctggttacctggaacacacgtgatcgacagatgtaaaggtaaatgtattagtcagtactgcttgaggcaagagaaaacagtagaagcaaacaaaagactaaccgaaaagcctgaaaggaaaaatggggaaaaagatgtttggggagtaggactttgaaaatcttcctcatattcttaagaacctgtaattccaagcacatactcagggctgggagcatgcccagaaaatacctgagaaggcacaaaaccctcatcttttggtgaccttcaggctctgcacaagccagaaatgaaggtcaaggcacagttaaatgcctacctaagtattaaaggcatgtccctatgtacacacagagcccacgtaaagagactagaagttttttccttttttgttccaggccttcaaatcactatatgaccattacgctatcagaaaagagacttcggtggccacacatgacaaatacagacattacaaagttagttctgaaatagaactattgtatattctaacaggagtttacaatatatgatattctacaactttagaacacacaatagttctatttcacaactaactttagaactgttgtatgttctatagatacaataccaactacaacaagtaaaacaaactctggagatggggaaaagtctgattcccaaattgctatattataatattccaaataccctagtttcaacaaaataattatgagggaggcaaggaaacaaacgttgggcccattacaagaaaaatgaagctggtagaaattgtcccttcagaagttcaaacactggacttaactagacaagtaaaataagtcaactatttaaaatctgctaaaagatgtaaaagaaatatgtataaagaactaaaggaaaccatgaatacaaattttcatcaaatgaaaaacagcaaaataggtacaactatggcatatcaaaaaaatacaaaaaatggaaaacattaagagacagaaactttaggaaggcaaataaaaaaatttgagttgaaaagtacaatagctgaaatgaaacattcagaacatatctgagcaggcagaagacaaaattggtgaccatgaagataggacaatcgatattatccagtctgaggagcagaaaaaagagagatgccaggtgcaatggctcatgtataatcccagcattttgggaggctgaggcaggaggactgcttgcaaccaggagttcaagaccagcctgggaaacatggtgagatcctgactctacaaaaaattaaaaaaattagctgggcatggtgatgcacgtctctagccatgcctccctatttgggaggctgaggtgggaggatcacttgagcccaggaggtcaaggctgcagtaagccacaatcactctgctgcactccggcctaggtgacagagtgagtgagaacctgtctcaaagataaagagagagagagagagagagagaatgtgagttttaaaaaagatgaacagagcctgagacctttgggataccatcgaacctaccaacatatataggatgtggagaaccagagagatgtaaagagagaaaagggtgagaaggttgaagaaataatggctaaaaacttcccaaaatttgatgaaaggcacaaatgtacaaatccaagaagctcaacaaactcaagtagaataaatttgaaaaaatagagattcatactgaaacacacacacacacacacacacattttttgagccagggttttattctgtcacccacgctggagtgcagtggtgtgatcatggctcactgcagccttaatctcctggggtcaagcaatccttccacctcagccttccaagaagctgggaccataggtgtgcaccagcacgtctgactaattttttaattttttgtagagacagggtccaagttgcccaggctggtctcatactcctgacctcaaggggtccttctgcctcagcctcccaaagtgttgggattataggcgtgaaccattgcagccggcatcaaacacatattaatcaaactgttgaaagacaaaggcagcatcctaaaaacagcaagacggagatgacttatgacgtaaacaggatcctcggtaagattacagtcaatttctcaatagaaaccatggaaaccaccaagcgctggagtggtacattcaaagagctgagaaaaaatggcaaccaagaattctatatctggcaaaactccccttcaaaaataaagaaatgaagaccttcccataaacaaagactgagtgtttgtcactattacatctaccctacaaaaaatgatcaagggtgacttcaggacaaaatgaaaagataatggagagtaacttgaatccacagaaggaagtgaagaacacaggtaaaggtaaatacagaggtgaatataaaagtcactgacaatgtgtttttggtttataacttctcttttattactacataatttaaagacaaaagcataaatgattacacatctacattaatgggcacacaatgcatacagatgcaatttgtgacaaaattactaaacagaacagctacagtgaaacaaagtttttatatactattgaaactaagttgctattaaactagattgttataaattaaaatgcttattaaaattctcagggcaaccactaagaaaataactaaaaagattaaaaagaaatgagaagggaatcaaaatggtccactagaaaatatctaacacaaaacaacaatgaaagaacttaggaacaaaaatgatatgacacgtagaaaaaagtaaatagttatagagcaaatagtaaataggcagaagtagctccttccttatcagtaattacatcattacaaggtggattttggcagaatggatttaaaaaataacccaattacagatggtccccagcttaccatggtatgattttttaactttatgatggtacaaagatcatacgcattcagtagaaagcacacttcaagtaccctacaaccattctatttttcactttcagtaccatattaaatatataatttataattgttgagatattcaatactttatttaaaatacactgctatgttagcccactgcccaactgtaggctaatgtaagtgttctgagcatgtttaggctaggctaacttatgatgttcagtgggttaggtgaattaaatgcatttttgacttttttttttttcattgttttgcatttttgacttatggtatttttaacttacaatggctttattgggacatagccccatcaaagttgcggagcatgtgtacatactgtctataagacacttgctttatattcaaagacacaaatatggccaatagtgaaagaatggaaaaagatatttcatacaataaaaattgttataaaacagagaaagacattatagttgtataaagcatcaatttatggagaaaatgtaacgattataaacatatatgtgcctaataagaactccaaaatgtatgaagtaaaaactggcataattgaaggaagatatagagtgttctataataatcgtttgagacttcaatactccactttcaataatggataaaacaacatattagaagatcaaaaaggaaacagaaggattaaacaataaactaactagacctaacaaatatataaagaacacaccacccaacaagagaatccatattcatctcaaatgcacatggaacattctccaggatagattatatgttaggctataaaaaaagtctgactaaattaaaaaacaatgaactcatacaaagtatcttccttaaccacaatggaatgaaattaaaaatgagtaacagggccaggcgcagtggctcacgcctgaaatcccagcactttgggaggtcgaggtgggtggatcacgaggtcaagagattgagaccatcccggccaacatggtggaaccctatctctactaaaaatacaaaaattagctgggcgtggtggtgcgcacctgtagtccgagctactcgggaggctgacgcaggagaatcacttgagcctgggaggcggaggttgcagtgagccgagatcgcaccactgcactccagcctggtgacagagtgagactctgtctcaaaaaaaataataaagttatgtattggaagccttaatattgttaaggtgacaatactacccaaaattatctacagagataaaacaatcactatcaaaattctgagttttttttcctttcagaaatacacaaactgatctgaaaattcatggcattgcgagggatcttgaacagacaagaagtgaaaaagaagaataaagtagaaagatttacacttactgttatcaaaacttactacaatgtaacaataatcaaggcattgtggtactgacccaaggacagatacatagaccaatggagccaggagcagtggctcatgcctgtaatccctgcactttgggaggcccaggtaggcggatcacttgaggtcaggagttcgagatatacagaccaatggaacagaattgagagtatgtaaataaactccagtgtgtatggccacataattttcaataagggtaccaaggtcatttgatggggaaagaataaaggtggtgagacaactggatatacacacatgcaaaagaatgaagttgaccctttctccacaccataagcaaaattcactcaaaatctatcacacagctgagtggaattgttaacactagaaaattcttggaagaaaacataggggtagatcttcatgaccttgacttgagcaatggtttcttaggtatcacaccaagagcacaagcaaaaaagaaaaactagatacaacagacttcatcacaattaaaattttttttgtcttctgagacggagtctcgttctgtcgcctaggctggaatatagtggatctcggctcactacaacctctgcctcccaggttcaagtgattctcttgcctcagcctcccgagtaggtgggattacaggcacctgccaccacgcctggctaatttttgcatttttagtagagatggggcttcactaagttggccaggctggtcttgaactcctgaccttaagtgatccatccatctcagcctcccaaagtgctgggattacaggcgtgagccactctgcctggtcacaattaaaacttttgtgcatcaaaggacactatcaagaaaatgaaaagacacccaaagaatagagaaatcatttatgtattatattttgaataaggatttggtacccagaatataaaatgaacttttaaaatccgacaacaaaaataaacaacccaagtaaaacatgggcagaggactgggagcggtggctcacacttgtaatgccagcactttgggaggccaaggcaggcggatcatttgaggccaggagtttgagaccagcctggccaacacagcgaaaccctgtctctataaaaaatacaaaacaatttagccaggcatggtggcacatgcctgtaattccagctacttgagaggctgaggtatgagaatcacttgaacccggaaggcagaggttgcagtgagccgagatcgtgctgcgccactgcactccagcctgggcgacagagggagactgtgtcaaaacaagcaaacaaacaaataacaacaataacaaaaatgggcaaaggacttgaatagacatttttccaaagaaaaatactcaacaagtacatgaaaagatgctccatgtcatttgtcattagaaaaatgcaaatcaaaacaagaacgagatagcacttcatacctactggtatgagtataatcaaaaaggcaagtgctgggaagatgcagagaagctggaaccctcctgcattggcgggaacgtgcaatggtgcagctgctgtggaaaagtctggcagttcctcaagaagctaaacacagacctagccttccactcctagtatatgcccaagaaaatggaaagtgggcatttaaacaaaagctcgtacacaaaaattcatagtattatagcattattcttgatagtcaaagagtggaaacaactcaaatgtttctcaatagaaaaatggattggcaaaatgtggtatgtccatacaatggaatatcattcagtcataaggaatgaagcgctggtacaacatacaacatagctaagtttttttgttttgttttttttgagacacagttgtgctctgttgcccaggctgcagtgcaatggcacaatctcagctcactgcaacctctgcctcctggttcaagcgattctcctgcctcagcctcctgactagctggggataggtgtgtgccaccacgtccggctaatttgtatttttagtggagatggggtttcaccatgttggtcaggctggtctcgaactcctgccctcgtgatccgcccgcctcggcctcccaaagtgctgggattacaggtgtgagccaccacacctggcccatagctaagtttttaaaacactgtgctacatgaaaagtcagacacaaaaggtaatgtattttgtaattacatttatatgatatgttctggataggtaaattcctaaagacagacaccagatgagtggttaccagcagcagtgggtagggaaagtaacgggtattggctgcttcatagggacggggtttccttcagggtgatgaaaatatggtgatattagatagtgttgatggttgcacaataccatgaatgtatgaaaaaccactggactggatatcttagaatggttaaaaatggtgaattttatgttgtatggattttaccacaataaaaaaagtaagcaaagcaggcaagtgttgccactggagtcattaaataaatgcaggaatgacattaggcttacctagtgaggccaggttcctgcagttctccagcatcacatccctgtacagtgtcctttgggcagggtccagcaacgcccactcctcctgggtgaactccacggccacatcctcgaaggttaccaagccctaaagcattgcaaacatcacggcttagccaaggaccacccccaccaacgtgcacaggaagaggggccaggagaacagagccagggctggggaaacctgagcacgagatgttggggggggtggttctgagctcacctcccagggttctgagctcctctcccagggttctgagctcctctcctggggttctgagctcttctccctggcttctgagctcagccctcaatgcttgtctccttaggccattcccaggtccagtgcacagtaccacagagcagctgccttttctcactcagactgggagctcctgtgatcttatttccctcaatctccaggggatcatgggcccgtgacatggcagaaagcagagaaatacttggtaagtgaatgactgatttccgtggcgtttattaattgcttgggtttagaacatcatcacgtctttacttggctttcccttaaaactctcaggagcacatgatgtactcagggaccctggagggagctctgaacctgcagtaaatgttgacacacactgacattttctgggcagccctcaccctccatctgatgcctggaaatcctgggatgcctgaggacctggtttggccatgaggctccaggctgctggaaggtatcaagtccaaccttctggccaaaggaataatgatttgggaaaaggaacatctgactcacccgtagccagcttgtcaggagctcattaaccagctctccgccctgtgtgtgtcctttttgctgagaggctgggaacagggaagacggagctggaggaggagaaatgagtcccatggattcaggcttgtctgacacccacagatctgcccctgattgaccacacccacctcccacacccacacggatgaggcaccacacagtgcccacctacgctccatgcaaacacctacccacagctctcctaagatacccaaacacagccctgtctcaccaaccaaagacaatagggctcaaggtctgactgcacttggggaagggattattcccacttcacagatgaggaaacaagttccaagggcgtcactgtgtttttatcagattcacagaaagaactaaagggagaattcaaaagctccagcacattcaccacacaggtgacatccacagacacccaaatgcctaagtcccaaatcccgagagctgcccgatcagacacggaggacctctgggcccctggggctccactcctgcctcacctgctctgcccaaccccgctcgtgtcccatgctgtgggtcagaacctttcaaggctggactctgagaaatgtcaggaccccacgactcaccagcagtcgagggcaggatgacagccgccatcctgtgactccgacagcaacagggcagccgggaagcaggacgctcctcctttatcccgcagcgctctggaagaaacgggaatgctccaagtctccgtggcctcctccctctcgggctgctggggatgggccctcctcaacccatccttcccatccttcttcaaatgcaagttccggcttccacactgggcctttattttgctgagcaggcaatgaattcagggccacctgatggaaaacttgccttcctctgtccccaacacaacgaccagtacctccctgacccacccgctttgagaacctcggcttcacgcagtctcacggcatgttcttcccatccaagcgcaccacaaacgcattcccggctactccctccttccccggggactccggcgcctccataactcctcccacctccagtcccagctcctggaggatgtcagagacccccagagtctcaggagttcctcagctccagggccctttgttccttctctcatcagccacatgtttccacaggtcccctcagccttggtcatcaccgggcactgtcccaccacccagaacaacgttcagaaactcccctctctctgaacccaacctccctcctcaacttccacggcgttcactccttttttctctcaccgcatgtcctccgaccacacgcaggcctcagtcacctcctcctgcctcggtcacccccctcctgcctcagtcaacccctctcctgcctcggtcacccccatcctgcctcagtcagcccccctcctgcctcggtcacccccctcctgcctcggtcacccccctcctgccttggtcacccccctcctgcctgtgctctgcctcagttaccccctctcctgcccatgttctgcctgttaccccaactcctgcccttggtcaccctgctcctgcctgtgctcggcctcagtcacccccctcctgcctcagtcagcccctctcctacctatgctctgccttggtcaccccctctcctgcctcagccaccccctctcttgatttcatcctcacccagcttggatgtcactgtccctcatttcagctgatttcctcctccctaccccccactgtcatgccagcccagcagaactccagccaggcgtgacttcaatcatccacctgctccaggggacattcgggcagaccaccctgtgcaaaggctgtgacgttgccactctggaataacacggtcaccaacgtgtagagaaccctcagcctgcagggcgatcccacaggtcagcatggcttcccactcgtcaaacctcctctcctctctttaaacttcacacctcctcccctgtcccctctgtggtaactgcttcctaacgagcccttgacgatcccagcctcccggtgctcacaccctgtgtaggcccgacgcacacacggaattagagctgacctgtgtgaccagcagaatatggctgaggagacagcgggggtgggtgcaggggtgactttcaggaccaggtcttggaaggcactacagctgcttccgccttggtctcctggatgttgctctagaggacaccagttgccatggtgggaagacgctcaagtggccctgtggagaggcctatgtggagaggaactgaggcctcccaccgacggccagctctgactcgcaggccatggagtggcccccggtacccgttgagccttcagatgatgcagacccagctgacagccttctgcaagtttccagccagagccttccagccaagctgctcctgaattcctgaaacacaaaaacagtgagagacgatacatggtcattgtttcaagtgactaaggtttgagatcatttgttaggcagcaagagatgacaaatcatctcattttcagcagacaatcccgatcctgcttctcagggtaaagatcatgaggaggaatctactttcctgtgttgctgccagcactgcaacctgtgccccacccttctgcctcctcccatcgcagacaaggagctgcctgccttctccgcagggcttgctgggcagttctggcctggggtccaccctcctgcttttgaggagctgtctgtgctcgaagctctctcctccgccctttcccttctagctctcccgtgctgctagacccttcctcatgcccctcaagcctgatgtggcatcttctgtagtgcgatgagcccatccttggggtacagctttctttccggttactgccccgtctgtatcccccatcccagccacagctcttcactctgtcccctttcctgagtcctcacacggtgcaatctggcttccctactatcatcccaaggacaatacccttgatggaatcgacaatgaccttactcaccagggagacgtggattgcagcaactctggcgctatttcctatctggcaggtcaacagagacacagtggcccacactcttcattctcacacactgctgggggtaacccctagggaaggaaacgtgctgatgtcaagcaaacctgcaaaaaacatttgttctttcctagaacccacttctagaaatctatctcaaaggtacacaaatactgaaagacacgtgtaagatgattcgctgtggcacttcatataatcgcagaggattgaaaacaccacaagtgaccatcagtaggggattgggtgaataaactatgtgatagctttaaggttggtgcaaaagtgattgcggtttttgccattactttcgatggcaaaacctgcaattacttttgcagcaacttaataaataacaaagaaacatgtagccaggaaaaaaaaaccccaaaccaaaaccaaaacaaagaacccctgaaaagatttctaggtattcagagagattatctccaataaatttaagtgaaaaaaaaatcaaggtacaaagcaatgtcatgtgtcctttttataagacgagaaagcctcctttctccagatttatagaataaaacgtaactccataaagccagcttctggaggtttccatgtgtgacctccatgacatgaacccaaaagataaaaggagtgaagggtgtgaatgggcagggatgggggcactggacattcagggtgagttcgggttccgtcaaaaaatcaagttggagggagtctttggctcttgggcctctgtggtagacagatgattaacttcctgctctcccaagaaaggggtctgtgttctaatccccagaacctctggatctactcccttacatggcaaaagggattctgcagctgtgaggaaggcaaggatcctgacatgggggatgatgctgggtgggcccactgtgattacaggggtccttataaaagggaaacaggagggtcagttcaaagaaggatgggatgagatgagagaagaagggagcgtgtgtgtagcagggaggagataacatacagagagactggaagatgctgccctgctggtgttgatgatggaggaacaagccacagtcagggaaggctggtggcctctacaagatgaaaaacgcaggaaatgggttctcccctagagcctctagagcagtggtccccaacctttctggtaccagggactggtttcgtggaagacaatttttccatggagcacggggcggcagtggggctgggcagggaatggtttcaggatgatgttttataagcacattacatttattctgcactttatttctattatattacacagtaatatataatgaaataattatacgactcaccataatatagagtcagtgggagccctgagcttgttttcctgcaactagatggtcccatctgggggtgatgggagacagcaacagatcatcaggaattagattctcctaaggagtgtgcaatccagatccctcacatgcaaagttcacaatagggtttgggctcctatgagaatcgaatgctgccactgatcggccaggaggtggagctcaggtggtaatgcgagcaatgaggagtggctgtaaatacagatgaagcttcgctcacctgccactcacatcttgctgtgcagccctgtttataagcactggtccgtggcccaggggctggggactcctgctctagagggaatgcaggccttccagcttattgaggatttctgacctccagcaaggcaagaggataaatgtgtgttgttttaagtccctgaatttgtggtagtttgttatagcatcaataggaaactaacatgcctttcacatcacaccttccctttgggtgagttcagcagacccaggcaactgctgcagaacttccctaccctctacagggggaagtatctcctttttccccgtaacagacctaatgtgcaggtaggcacacagtagttccagtcactgagctggggagtgagggggggttggcctccagccagctcactgggcctccaagaaaaaaacaagtagagaaggtacctgggacattttcaggccccaagtccctattcaaggctgtctggaagcagaaatttcccactaggacaggaggggtctcttcagtttacagatcctgtgacacctgccctgccctggatacagtgctggaggatggtcacagcagatgggccactctatgtcagctgcccaacacaacttctggtgatgatggaaatgttctataattctgctctaatacttgaaatgtgactagtatggctgagaaaataaattttattttttttgggagcaatcatctgattcctaaactacctccaaacaccccctcttttgcctcttaaatgtcttccttctgaatcctgaagtccttgttatctgcatgcttacactacatgcaaattgcatcaccctctggcccacaactctttagtgtcttcccactggcctgagaacagagtctgaagtgaggcctagtatggttctgcctccctcttgatcttggtcttggtcacacttctttccctattcttttttttttttttttttttttttgaggagtctcactcttacacccaggctgaatgcagtggtgcaatctctgctcactgcaacctcagcctcccaggttcaagcaattctcttgtctcagcctcccgagcagctgggactacaggtgtgcaccaccacacccagctaattttcgtatttttagtagagacggggtttcaccatgttggccaggctggtcttgaacttctgacatcaggtgatcagcccaccttggtctcctaaagtgctgggattacaggtgtgagccactgcgcccagcttctttccctgttcttgtctcggcttcagccatccctgtgttcccagtgcagggagcgtggcagcctctctcctgctgcagggcctttccttacacagcttcttcgacggcagtgctctcttggacataaccctgtcccctcactctagtcgagccctatgactagctacatctgaccccaacttggagatggagcagcaattccctttttcaggggcctgtgaaccccaagtgggaaaataaaggaaaatcctgaagttcctttaagggaaattccgagcatccagctagccccaaaagtaaatatggaacttgttaaacaggaaggtaatagtaacctaaaacaacagccaaagaagttaaggctccagagatgttcgctttccccatggaaactaaagataacatcttaacatgcgtccctgagttgcctttcagaggctgggactcccactgaggaccccaccaaatggagctgctggctcagagaccccagataagcgggacatgaaggctgagcttcagcgttctttgtgctaagtttcttcttgaggggcttggagaaagtcacttctcccagccagttaacattttcctactgactctaaatttttaaacaaagcttcttttctttaaccaattacaaatcagaaaaatctttgaatctacctatgacaagctcctgcttcaagacatccttgcccttttaagtctaaaccagtgtgtaacctccatgtattgctttatgattttgcctgtagcttctgcttttctgtaacttaccattgccttcagaaatccttgcctagccgggcacggtggctcatgtctgtaatcccagcactttgggaggcctaggcaggcggatcacctgaggtcaggagtttgaggccaacctggctaacatggtgaaactctgtctctactcaaaatacaaaaaatttgccaggtgtggtggtatgtgcctgtaatcctagggactggggaggctgaggcaggaaaatcacttgaacctgggaggcagacgttgcagtgagctgagatcgtgccattgcactccagcctgggtgaccaagtgagattctgtctcattaaaaaaaaaaaaaaggccgggtgtggtggctcatgcctgtatcatctcagcactttgggaggctgaggcgggtggatcacgaagtcaggagattaagaccagccgggccaacatggtgaaaccccgtctctactgaaaatacaaaaattaaccgggcatggtggtaggcgcctgtaatcccagctactcaggaggctgcggcagaactgcttgaacccgggaggccgggggttgcagtgagctgagattgcaacacagtactccagcctgggtaacagagtgagactccatctcaaaaaaaaaaaaattccttgcctaaaagccactggggaggccaggatttgaacatttaatgtctggtcctccttgcttagtgctgtgcaataaaagcctttctatctatcgtagcaaccctcaatatagacatctggtttcactgcaccaccaggtgagcagaccccagtttggttctgtaacaacttaagctctcaagctaaatatccttcccaagaaagcttccctgttccctctgatcaagttcactagtgccaagctcccacatcactcctgtcattcatggtttaaaatttatcttccctgttagaaggtaaactttatgtaggacaggggccatttcaggtcctccagggtccctgtgcatctgacctaggacctgactcatggaggcgacctggtttgccaaggattgtcccggtttgaacactggatgccctgtgccctagcaaaccccttggtcctgaaaaaatgaggatggttggtcaccattaactgtgcactcaaataatatctattgcatgataagtaaacattccttcaagaatgctgtaggaaagctagaatggaaaaggtgaacacacacacaattagtagaaaccccacaatttaatactagattacttaacatgattctctgcaatatgaatcaccatactgttatttcagagaagttttaagaaacaaagttaattcctattaggaggtgatatcgttggctctgtgtccccccacccaaatctcatctcgagttgtaataatccctatgtgtcagaggagggtcctggtaggaggtgactgaatcatgggggcggacttcccccttgctgttctcctgatagtaagttcccacaagatctgatggtttagaagtttggcgtttatgtcttctctctctctcctgctgccatgtaagacgtgccttgctttccctttgctttctgccatgatcgtaagtttcctgaggcctcccccgccatgcagaactgagtcaattaaacttctttcctttgtaagtcactcagtctcagggagttatttatagcagtgtgaaaactctcaggtagttctttatagcagtgtgaaaaaggactaatacaggaggcaaggtgcagaggacaatctttttggaaaccagttccctacccttcaatctataagttgttgcttaatattcttccaaatgttttcaaatctcattaggaaaaaaaaaatcccattactcaaaacacatctggtcgccggtcaatttaattttaaatttgttactaataaatcatcctttttacaaatgcccttatattttgaagtttggtggagggccaatatgcctttagaaatcaaatcaacagctgggtgcggtggctcttgcctgtaatcccagcactttgggaggctgaggtgggcggaccacttgaggtcaggagttaaagaccagcctggccaacatggcaaaaacctgtctctactaaaaatacaaacaaaattagctgggcgtggtggcacttgcctgtagtcccagctactcaggaaactgaggcaggagatttgcttgagtctgggaggtggaggttgacatgagccaagatcgcgccactgcactccaacctggccaacagagtgagacttggtctcaagaaaaaaaaaaaaagtcaaatcaaacaggcctgaaaaatgttgctaagtagtcctgctagttgttagtgggaagacttgtaacactacatatacatgtaaatattttctatacttatataaaattcagaaacttttagcattacggcataccagaaaatctgtctttagctacagttacacatctttacgttatttgtatgtttgttttgtggatacttatttgcatgtaactgtatttacttatttacacacatgtaaccataaacacctctgtctttttaccttgaactttccttaagataccttcactcttagtgacttcaatgtggttacaaccccagcacaggaaaagcccacgaggagttcttctacacagcagagcctgctgaaaccttgttgtaggttccacactgtactcacctggtcacccaaaaacccacaacaacaggtggaccttgtggcaggcttcaacacgaatctgagcttgaatgatgcttttctcatctgaaaaaaaaaaaaagacacaaagatttctttcgaggctttgtataggttgtacagttgttggatacggctgccggaaacaccatcccattcactttttttgggtactcaatgattaaatgtgtaataagggcccagcctgtgggccatgactggctttacctgattcccatctggccatctgctccgtaagaggggagaaagcagcttaacgctgtgtgcatttgacttgctcaacttactacgctggagagagattctatggtgactccacaggctttaaaaatatcttgtcacttagaggccctattaagtgactaaactgaatttttaacaatttatgtagtttattcagaactgcagagattttttttttaaggccctagagcagggtttcccaacctggcactactgataattctttgttgtgggggactgtcctgtacaacgtaggatctttaagagcaagcagcgtccctcttccccggcctccaccctctaggtgacagtagcagcctcccctccccacaatttgtgaaaaccacagtcgtctccagctacagccaaaagtcccctggggtgcggaatcgccccgggtgagggcgactggggttccctgaggaggcaacagcggcgcggggccccgacccaggagcaagcagcagcttcgtgctgacctaagctcacagcccgaggcctcatgaaccgaaacacggctccctggagggacgcagggcccgtggctggcggtgtccgcggcccacgtcgccccctggactcggacccgagcccccgccagtcgctcaccgagcccggcccctcccgcggggccaaaagcgccgactcgcggggacggagggactcgctccccgctgccccacgcgcggcccctcccacggtaccgccccgcgcttccgcttccggtctggggagaggtgcgctgcacgtccccttccggctcgcgcgggcagcctcgcagagtcgagcgtgttgggggttcggcgcttaggcgacaggcgcggcgggcgggagcggcggccgcgaaccccagccttgggcagaggtgttctagtttgcttagtgggcacaaagttgggccctggcctggggcagtagcgggggtaaggttggccctgggggcggggccaggctgtgagccgcacgaggcctgggggcggggctggttgtgggcggagatcagttccggggcggggctgaaggcggggaaccggctgaggccgtaccaggcctggagggcgaggctgattgggcagagaccagttccagggtcggggctgtgggtggggcccagttctcggggcggatggtataaggcttctagagcggggatgactgagcagagaccagttacaggggtggagacctccatttccggggcggggctgagcgggaaccaggctgtggttgtgacagccctggaggttggggctggctgtgggcggagataagctccgggccgggcggagggcggggactaggctgtgggtgtaccggtcttggagggcagtggtgattggcagagagcagttctaggggcggagctatggggtggcagcaagcctgggggcggggctgactgtgggcggagaccagttctgggggcgggactgtgggctgcaccaggcctggggagggggcagtgggtggagaccagttccaggggcagggatctgggtatgaataaaagggtgtatgatgtgggtgggttgggataggcccaggagccaggattgtgggagatcagattcaggggtagggccttccttggatccctagattgttgatacagttactgccccatgttcatacaacccaataggatcagattatgtatgcacatttgtctataacttgctttcccaaggcagaacatagtgatttaacactaagagtttaggggagcaggagaggactgggtcatagatacacatataggaaaacttaagaatggtacaaagtcagtcaaatattctcccaccacggtctttcagttcttttgctcagaggcaaaaataattttctcctctatctttccagatatagtgtggacatgtatgtgtgtgtatgtgtgtatgccgtagtcatattcatggaataaatgctattacctcccccccaacaagtctctgttttatacaccatggatatagactgaacaaaataggtaaacgtccttgccctcagagaacgtgcattttagttgtgagttgggcaggagaaatggacagtgaatgtgataaatagaatacatggtgggttggtgcgttagataccactaagtgctggttggacctggtggcttacgcttgtaatcccaacactttgggaggccgaggcaggcagatcacctgaggtcaggagttcgagaccagcctgccaacatggtgaaaccccgtctctactaaaaatacaaaattagccgggcgtggtggcggatgccttgtaatcccaggtacttgggaggctgaggcaggagaatagcttgaactcgggaggtggaggttgaagtgagccgagattgcagccggtgcactccagcccgggtgacgagcaagactccatctcaaaaaacaaaacaaaacaaaaaccaaaaaccataaacaaaaaaagatactggtaagtgcaaagggaaaaaattttatgtaagagagtggtaacatttaaaatcagccaggaagaaatactttcaatgaatgatattgtttcatgcacccgtcctttcagaaaaaaatagttagatctctgcttcccaaaaatatccattttcaggtggctgaaggaagtttaagcaaaaatgaacaagttcaaaattcaatatactaggaaagttcactgtggaaagactgttctcttcaacaaattgtgctgggacaactagatgccaatatacaaaagaatgaaattgggctgggcgtggtggctcacgcctgtaaccccagcactttgggaggctgaggcaggcagatcacgaggtcaagatatcgagaccatcctggctaacatggtgaaaccccgtctctactaaaaataccaaaattagctgggcgtggtggcgggcgcctatagtcccagctactcgggagactgaggcagaagaatcgtttgaacccaggaggtggagattgcagtgagccgagatcaccccactgcactccagcctgagaacagagcgagactccatcaaaaaaaaaaaacaaaccaaaaccaaaaaaaaacaaaaaaaaaaccaaccaaccaagaaacaaacaaaaaacagagaatgaaattggacctctacttcacaccatgtacaaaagtgagctcaaaatagatcatagacctaaaggtaagagctaaaactataaacttcttggaagaaaacataggtgtcaaactttgtgatcttgggttaggcaattgtttcttagatatgacatcaaaaacaggtggcgaaagaaaaaatatataaattggacttaacattaaaaaacattgatgcttcaaaggacaccatcaagaaaaaagacaaacatggactgggtgaagacatttacaaatgatttatctgatacatgacttgtattcaaaatatataaaggcttgcgactcagcaataaaaagatacccaattaaaagtgaacaaagagtttttttttttttttctttttgaggtggagtctccttctgtcacctaggctggagtgctgtggcaccattttggctcactgcatcctctgcctcctggattcaagcgattctcctgcctcagcctcccaagtagctgggaccacaggcgttcaccaccacgcctggctaatttttgtatttttagcagagagagggttttgccatgttggccaggctggtcttgaactcctgacctcaagtgatctgcccaccttggcctccctaagtgctgggattacaggtgtgagccactgcacccagcctgaaaaatgaacaaagagttcgaatcgtcatttctacaaagaagatacacaaatggcaaatatatacatgaaaagatgctcggccccattaatcattagggaagttaatatcaaaacttcaataaaatactacttcacacccattgggataattaaaattaaaaagatagccaataacaaagattggcaaagacaaggagaaattggaattcttatacattgctgtcaggattgtaaaatggtgcacccactttgcaaaatagtttggcagttcctcaaaaagtcatagagttgccacgtgacccagcaattttatttccagtatatgcccaagagaaatgaaaacatgtgttcacatgacagcttgtacatgaatgttcatagcagcattatacataatagcccaaaattttgtatgtcccaaatatcagtcaactgatgaatggataaataaaatgtggtatatccacacaacggattattattcatccattaaacagaatacatattccatggatgaaccttgaaaacattacggtaagtaaaagaagccactcataaaaaacccacattttgtataattcaatttaaataaaatttccagaataagaaaatccaaagagacaatagattagtggcaaatgttggggaaaagggaaatgaggggaagtgggtaatggtatggatttcattttagatgaaaataagattagatagtggtgacgattgcgcaactgtgtgaatgtactaaaaaccattttacacaaaagtgtaaaaactgtacactttaaaaggttgaatattatggtagctcaataaagtttttatttaaaaaatgtagaattatacacataaattcttcagttaggcataataagagaataaaagtggaaaaataaaatactacataaatatgagtgcttcttcctcaaaataatagaagaaaagtggaaaaagtaaaatactacaaaaatgtgagttcttctcttcttcctcttcctcctcctcctttcttccttcttccttactcctccccttcctcctcctccttgtcctcctccttcttctttcttctttcctcctcctccttcttctcttccttttcctcctcctccccccctctcctcctccttctttcttcttttttctttttttttggagacaggatcttgctttgtcacccaggctggagtgcagtggtgcaaacatggctcattgcagcctcgacctcctgggctcaagtcattctccctcctcagcttcccgagtagctgggactgcaggcgtgcaccaccacgcccagctagtttttgtattttttatagagacagggactcgccacaccacagaggctagtctcgaactcctgagcgcaagcaatccctttgccttggctgcccaaagtgctgggattttaggcatgaccccatcgtatccagcttaagtgtatcttaattttccacaccatcacattattaaatggcaaaacaaactggggataaataattgtaaaaatctatgacatgtgggctcatatcattattacataaagaatattttggataaataagcaaaagatgaacaagccagtaaaaacatcatcaaagacaaaggctatgaaccacacactcctttacaaatacatacaactgcccaatactctaattagcaaagaggcataaattaaaataatggcattatgtttgtgcctctcaagtaatgcaaaacattttaaatggccagtttgtcaagacatgaagaaatgaatgacctcgccctctgctagcagcattgataagtaccagtttctcagcaggtacttggtaacatatacccaaagctgtacgaatgtgcatatttatcaacccagcaattttacagtgatctaaatcagagaaatgtttgaaccttgttaaaaaggattgatcatctacctcctatttaatatgacagaagattagtaacaatggcaaaataagtactggtgtagccgtatgaaatgacattcatgggccttaaaacaacaatgtcaatgtacatttagttatattaaattacaatcgggatatattgttagatgtgagaagctggctgcagaatgaagtcggcagtgtgtatccatgttgtaacccacaaagtctaggaatataaaattccagggctcgacaaccacttaatgcctggaccctttctgcctcgaatgggggtggctagaaacttctctggctggagggcagaaggcagagtgcaaagttttgcctcaagccttgtgacagggataaagaccctcacccttcacactggcctcatggacaagacaagttcttgctttcccacagagtacctgagatctgaggatactttatactctgatagtcacttccggctaccttaattctgctagagtaaaaacaactagtagcttccacctaaccagatgacgcataaaataattgctactaaatatttcattccatattttggttagtaaggaagagaaggaggtaaagaaacttgaagtgaaacaactggaagggaccaagatggagcaggcagagttccttatacacaggagacagcaaggctgaaattctacccagaagatcagcagccctggccaggcacggtggctcacgcctgtaatcccagcactttgggaggccgaggcgggcggatcatgacatcaagagattgagaccatcctggataacatggtgaaaccccgtctctactaaaaatacaaaaaataagctgggcgtggtggtgcacacctgtagtcccagctactcaggaggctgaggcaggagaatcgcttgaacccaggaggcagaggttgcagtgagccgagatcgcatcactgcactgcactccagcctggacgacagagcaagactccatctcaaaaaaaaaaaaaaaaaaaaaaaaaaaaaaagatcagcagccccactatcaccttcctccagggcaaggccacctgtggaaatgacagatgtcaaataatccccaaaggaattgctaaggatggagatgtcccatggaaacaaactgcatattgcctaaccctctcccgaggacatggatatattgagatagtaaatgttttgaaggctatgcaactctgcaaacaaccaagcatgcacagaacacaggctgtctggtgataactcctagataagcaccaatatagcacctcagccacagatggcatgccacacacaatgaattctaaaagtctattttaacctgcgatggccaacatattctcatgtgtgcatgcaatcaatgtaaaaattattgagacgttttaggtgcgactggctggggctggcattgttggtggtaaaataatttcccaagacagtcgtaggtaaagaaagacagatttattagagaagatatgaagataggttgcaaggatgcaacaggcagcacagaagagaaggggccatttgcaaagaggcagaggttggaggggattttatagggtcgtgctggaggcggctatgtgcacgtgaggtgtgcagataaggtcgtgttcctgggactatgtgcagaccgaggtcttttggaacagaatgtcatgccagtgggttgtttgcagttagccatctctcagaacaattgttctcccccaaccaggggccctttccttgttgttggttacttatcttattaggactccacatgagaccttttaaatgatttttgttttttgtaatgagttccagaaatccagttcgtactttccactgatggcacatctcaatttgcgagttgaatgttatcagatgtacttgccccgtatttagattttcttttttttcttttcttttctttttttttttttttttgagacagagtctcgcactgtcgcccaggctggagtgcagtggcgccatctcggctcactgcaagctccgcctcccaggttcacgccattctcctgcctcagcctcctgagtagctgggatacaggtgtgtgccaccacacccacctgtattaatattatggctaatattttgtatttttagtagagatggggtttcactgtgttagctaggatggtctcaatctcctgacctcatgatctgcccgcctcggcctcccaaagtgctgggattacaggtgtgagccaccgtgcctggccatatttagattttctagggttcacagctgtaaagtaagattcacatgtccaggttgttccaagcatacttcaaagctttccacttcaagagtcatgtcagatgaataatgagaattcctttgggatctaacaacaaaggggtcattgtggccttagcaacagaagcagctgagaacggtgaaggaaaacagaagtttggggtggcctgaggagttgctggaggtgaggagataggagacatagatgtagatgatcttttctcagtggttcatagctaaggggaagggataggcagtagtggtgaaggagggggtcccaggaagtttaggagaggagtgtctgtgtagctcggagaaacttgaacatgtttaaatgccgaagaagggattcagtagaaaaacagaagttaaagatatgggggcatctgtaatcccagcactttgggaggttgaggcgggcagatcatgaggtcaggagttcgaggccactctggccaacatggcgaaaccccatcgctactaaaaataccaaaaaattagctggacatagaggtatgtgcctgtaatcccagctacttgggaggctgaggcaagataattgcttgaacccgggcagtggaggttgcagtgagcccagatcatcccactgtactccagtctgggctatagagcgggactccgtctcaaaaaaaaaaaaaaaacaaaaacagatgatacaaaggttacattgcaatattggaagcataaaattaacaaaaaggaagaaggaatgaggctcagatcactcttggtggataaaggaaacatatttatgtatttatgagacaaggtcttgctctgttgccaaggctagagtacagtggcctgattgccgctcactgcaacctcgacctcctgggctcaagctatcctcttcactcggcctccctcactcagctgggacctcagacatgtatcatcacccccagctaactttttaatttttagtagagatgggggtccccctacgttgccctgactggtctcaaactcctgtgttcaagtggccctcccgcctcagcctaccaaagtgctgggattagatgtgtgagccaccatgcctggcaggaaatctctttaaatacaattaaaggaaatttggaaacattcaatgcttatcagggatatttgcagatttggcaactaacgtctttgggaaccatcaggtaagttaaggagaattaaatatctatgaggaaaaaagaaagctggagaaaattttgcaacaggttttggggaaaatcaaggagtaaacatgacagtgcatacacagaaaataaagtttctacgcatgatggattcttcccagttgatggagaatattttgtatttatagtggcactaagacgtcatgtcacgtgattcttttttcagcagtgatcatatgacggtggtagccatggcgtcacagagaacagggaccttccaagtttgaagttttacaaggcaggtgtgataagtggtaaggaattttggattaatctaaatgaatttttttttttttttttagacagggtctcattctgttgctcaggctggagtgcaatgatgtgatctctgctcactgcaacctccacctcctgggttcaagtgattctcccacctcagccttccgagtagctgggactacaggtgtgcgccaccacacccagctaattctttttttttttttttggtagagatggggtttcaccatgttggccagcctggtcttgaactcctggcctcaagtgatccacccacctcggcctcccaaagtgctgagattacaggcgtggagccaccgtgcccggcctctaagggaaatattgaggtcgcagaccacagaatccaagagtgctaggaatcagaggagagagaggaaggtgaagatacggaggtccggagtaattcaaatacccaaatcacagatacttgctcctcaaggtatgttcatcaagaacaggtatctatggtatgggcatttgaattaaaaaacctggaaatcagaaatttatagtgggtgaataagttttccgatttatttatttatttgttttgagacagtctcgctctgttgcccagactggagtgcagtggtgcgatctcggctcactgccacctccagctcccgggttcaagctattctcctgcctcagcctcccgagtagctgggattacaggtgcccgccaccatgcctagctaatttttgtattttttgtagagatggggtttcgccatgttggccaggctggtcttgaactcctgacctcaagcgattcgcctgccttggcctcccaaagtgctgggattacagatgtaagccactgtgctgggtcagaattatttatttttgagcatggctgtttgggttgctgaaaatgtctggggtgtgggattaaggctcaaagagcagagcagttgataatttcattattgacttacaagctgcaggaactgtgcaaaccaagaggtcaatgtgttaaacagatgaatagtcaagtaatgcataagaatggcaggatttgggctgggcacggtcgcccatgcctgtaatcccagcactttgggaggtcgagggggggtggatcacttgagttcaggagttccagaccagcctggacaatatggtgaaacctcgtctctacaaaaaccacaaacagccaggcatggtgatgcacgcctgtagtcccagctacgcgggaggttcaggtgggtggatcacttgagcctggggaggtaaaggctgcagtgagctgtgattgcaccactgcactccagcctgagtgacggagtgggacaaaaaaaaaaaaaaaaggcaagatttgagatttagaaaaagactgtcatatttgtcatgagagggagtatcaggacttgagcatttaagagtgacaagggcagaaagagaataaaatagtactcaaacaaggagggggtttgcaggatgatgaaggagattttgaccttgaactttctgtgcttgactcaaatctgcctgatgatgtcccaggaagcaggtcagacctatccccagagggagagaggaaggatgaaagtccagaacagctgagatccttgtcctgagaaggcaggcttcattgatcaatttgaccccatttcatgatttattttaatagtgtaagaggaaaagaagtgtgatggccaagagttcacagaggaagcaacgtgactgtgtaaaccaatgcaaatcaaagcctggcttgagcacctcaatccctttgagaatgtccagttacacattcaagaggccagtaacgagaattacaccccatcctggcaatgaggtcagataccatcaatgggaggagagcttggagaagcctcagcaggtctgctggcagaggagactgcagggactccaggcttacagcagtgcaggagaactttcaagcactttggatcttgccaataccttgcaaaaacttgtccctagttacacaggtggatctctgctggaggatcttgccagtggtctggagcactcctgccccatgccccaccttgcctgctcttcagatgcggtggagataattcctgcagagggagtgggtatctcgcagctcctctgcaaacaatttctggttactgaggaagatatcaggaaacaggaagggaaagtgaagacagtcagagagagactcgcaatagcactgattgcggatggactcgctaatgaggcagagaaagtgagagaccaagaaggccgtcctgaaaaacgctaagaaaaaaagggaagatagtgcagatgaaataaagtgtaatcctttattaacatctctttgcagtgtccccaatgaggtttttttgctttaagctcttgaaactttaaaatatgccaatacttaaaaaaaaaaaaattaggctgggtgagcacctaagagcacctaagtaagtaagctcagaacagggtgcggtggctcatgcctgtaatcctagcactttgggaggctgaggcgggtgatcacttgtggccaggagttcaagaccagcctggccaacatggtgaaaccccatctatattaaaaatacaaaaattagctgggcatggtggcaggcacctataatgccagctactcgggaggctgaggcaggagaatcgcttgaacccagaggcagaggctgcagtgagccgagattgcaccactccactccagcctgggtgacagattgagactctgtttcaaaaacaaaacaaaacaaaacaaaaaattacactcctttgtgtgacacaagggaataaagacaataatttctttttgaggtgagagattgggtttcaggtgggcagggaaaggagattttttctttttcatgttatactctcatttttatttactatgtatgtatgtatgtagtccaggctggagtgcggtggtgccatcatgactcactgcaggccaggtgcggtgcctcatgcctgtaatcccagcactttgggaggccgaggtgggtggattgcttgagatcaggagttcaagaccaacctggccaacatggtgaaacctgtctctacaaaaaatacaaaacttagctgggtgtggtgatgtatacctgtagtcccagctattcgggaggctgaggcaggggaatcgcttgaacccaggaggcagaggttgcagtgagccgagatcaccccactgcactccaccctgggcaacagagcaagactccatctcacaaaacaacaacaacaacaacaaaaaccaaaaaacaaaacaaacaaaaaaccccaaaacaaacaaaccaaaaaacccaaacaaacaaacaaaacctcactgcagtcttgaactcttggactcaggtgatcctcctgcctcagcctcctgagtagctgggactacaggcacatgccattacatctggctaattttttctattttttgcagagacaaggtctcactctgttgcccaggctggtttcaaactcctagacttaagcaaacctcccacctcagcctcccaaaatgctggggttacaggtgtgggccaccatgcctggccagtattctatcatttttaacacatcaatctcagaaactggtaaatccatcaaacaaaagcaaattaatgataaagaggactggaataattcaataagcttgatcaggcaagtagacaaatagactttaactcgtattcccaacaagcagaacgatggtgcatcgttagattcttaacactgaaaagtctctctctcttttctttttttgagacaggggtcttactctgtctcccaggctggagtacagtggtgcgatcttggctcactgcaacctctgcctcctgggttcaagcgattctcatgcctcagcctcccaagtggctgggattacaggtgcccaccaccacacccagctaatttttgtatttttagtagagatgagatttcatcatgttggtcaggttggtctcgaactcttgacctctagtgattggcccacctcagcctcccaaagtgctgggattacaggcgtgagccaccacgctcggcctgaaaagtttttcttgatattattatccctcaaattgtgtcgactttcctgattcaaatttcaaacacatatagacttagagaatcagggaaagtctggtagttcattaaatgcaactctgaattaatgggcaatcaagaacagaaaaataactagagttagatagcttatttgagaacgtagatataaaaaactctttccttaaatattattttggaatccactgggatatttcacaaaaataataatcaattctgattgggtaggctttatcctgtgatgatgaggacaaagcactgaataattttataatcttgagtactgcctactgactttaagataagtgaattaagtcagacacagatagaaaatgatgcattgacctcacttctgtgtggaatctaaaaaaagtcatatagactggatgtaggctattggtattttttttcaagcaaacaaaacattaaaacacattctaaggctgcacgcagtggctcacacctgtaatcccagcactttgggaggctaacgtgggtaggtcacctgaggtcaggcattcaagaccagtctggccaacatggcgaaaccctgtctctactaaaaatacaaaaattagctgggtatggtggcacccacctgtaatctcagctactcaggaggctgaggcaggagaatcgcttgaacctgggaggcggtggttgcagtgagctgagatcgtgccattgcactccagcctgggcaacagagtgagactccatctcaaaacacaaaagaaaacaaaaccaaaaaaatccccacattctaggacacacatgattaccacgtggaagcacagagcagaaaagatgaaattttaaaataacaaatttttagggaagctataaataatatagatattgcactctattttttttttttagagatggggtctcactgtgttgcccagacttggagtgcagtggtgcaatcatactgcagcctcaacctcctgggctcaagggatcttcctgcctccgcctccctagtagctgggactataggtgtgtgccaccacatccagctatttttttcttttagtagagatgggggtctcattatgttgccaaggctggtctctaactcctggcctcaagcgatcctcctaccgtggtctcccaacatgctgggattacaggtttgagctactgtgcctggcccatagaaccatttctgacccgtttatgtcttcttggtctacttcccattgtagaggacccgtgagatggataatatgccacccagggaacactaatctggaaattctggtgcatttgagtttcagagaatgaaatagtggaagagaaacttgcaactgccagggtttcttgggggcagggatgtgggaatataaaggaacaggatgggtgtgatggctggtataggagtcaagggtgggtgtgtactgagtgacaaaggtgggagaccttacactgaagtggaatgttgattttccaccatggcaatttcttttttctttttttgagatggagtcttgctctgtcgcccaggctggagtgcaatggcgcgatcttagctcactgcaacctccacctctcagattcaagtgattctcctgcctcagcctcccgagtagctgggattacaggcacccaccactaaacccagctaatttttttgtatttttagtggagttgggtttcattatgttggtcaggctgttcttgaactcctgacttcaggtgatccacctgtcttggtctcccaaagtgctgggattacaggtgtgagccaccgtgcccagcctccatgatggcaatttctgtatcagtgaaacaggaggattccctgagctcccttgcaggacatgtgacaggggtgtggctcatctgtttggctgctgggtgcactcaaaccccttatgggacggggagcacacagacaggcaggtgcaggagccggggccagtgtccctgggctctggccccatggcagcatccacaggtgggagactgcaactcccaaagcccaagtggctgtgtgttacagtgtgctccttagccttgctgtctgtggatggctcaagtgttaaccagctcagtgccctcttggtacccaagtccttgtccagcatccaggaagaatcaggtcacacatagacttgaaggatgaatgccagggttttgttgaatgggggaggtggttctcagtgggatggatggggagctagaagggggatggagtgggaagatgatcttcccctggagtttggctgtccagtggctagtctcctctctgactgtccccagttgaactcctttcggcattcagatgctccttctcttctctctgctgtgtcgttctgccattcttctgcttgtggagcctggggtttgaggtttatatgggtataggataggggagcatggtgggccaaaaggtgactttggggcatgaaaacaggattgtctgttcccatttagggccacaggtctccaggcttgagggtggggcctttgctggggaacctccctcttctacccagtatttccctgtctcctgtccatatcatcagtaatgtagtttggatatgtgtccccaccaaatctgatgttgaattgtaatccccagtgttggaggtggagcctggtaggcggtgcttgggtcataggggcagatccttcatggtttgatgctgcctttgcaacagggagtctgtacttgtgagatctggttaagtgtgtggcacctttgctccccccaactctcccttgctcctgctctggccatgtgacatgctggccctctcttgtgacatgctggccctcccttggccttcaccatgattggaagcttcctgagacctctccagaagctgatcagatgctgacatcatgcttcctgtacagcctgcagaactgtgagccaattaaacctcttttctttaaaaattacccagtctcaggtatttcttttttctttgttttttttttttttttttttttttttttttttgagacaggatctcactctgtcattcagggtggagtgcagtggtacaatcacagttcactgcagcctcaacctcccaggctcaggtgatactcccacctctgcctcctgggtagctgggactacaggcacgcaccaccatgcctggctatttttaaaaatctttgtagagacagcattttgccatgtttcccaggctggtctcgagctcttggactcaagcaacctgcctgcctaggcctcccatagtgctaggattacaggcgtgagccaccgagcctggccaggtattttttttttttctcttgttctttttttgagacagagtctcgctctgtcactcaggctggagtgcagtggcgtgatcttggctcactgcaacctctgcttcctgggttcaagtgattctcctgtctcagcctcccaagtagctggcattacaggcgtggaccaccatgcctggctaattattgtatttttagtagagacagggtttcaccaagttggccaggctccggtcttgaactcctgacctcaagtgatccacccgcctgggcctcccaaagtgctgggattataggtgtgagccactgcgcccggccaggtatttctttatcacagtgcaagaacagcctaatacaatcattttcaccaattctggtgttcccaagggatgacatggtgcgaaaccacaacacacaactgagagttgcctttgggacttcacgaaggtggaagactgttctcttagtccaacatgaaccagtcaggggtcacgtcaaggaaggctcagagactgtgtccgaccaatatggtttatttctgccccagccaagcttctttggaccctggctgggggaaaggcaccccaggcaccggcaagttccagtcattgcagatcctccaggtctaggtgtgactggtagtagcctgggcactgttgctggacgttgtattctccttccttcttccgccggcgggtggtcacctatgagggtgaggaggaggcgtgagaatggactggtcagccgtccagggagaggagaccacaggggtgagaatatggccaaagccagaggccttatgcttcctctgtctcccttcattgtttcatttaatttctccctcagttcttttcctcttttcaccactttcttttcttctgtctccttgtttcactctcggtttaaaaaaatttttccccctccgatatccccttcatttctctctccttttgcctctgaatttctttatcaatatatcacatatctaccaatgatctatttatctatcatctagctatcaatatttatcaacctgtcaatcaattatctaccaatcaataaccatcaattatctctcacctctcaatcatctcctatttataatccatcaatcatctatcaatcacctgtcatccatcaatcatgtatttatcatctacttatcaatatctatcaactatctgttacctatcaatttattatctaccaattatctatcaaaataatctatttatcatctacctatcagctatccaccaatcatctgtcaactatcaatcatctatcgcctgtcttctgtctaaataccatttctctctcatctcattctcagtctctttctctctggcttttggtcctgatctcagccccctctctccctcccttcctcctctacatctgtccagcttaactgaggcataactgacataaaataaactgcacacatttaaagtgaatgttttgataagttctgatcataacttattgaatcgtcaccacaatcaacataaggaacatccatccatcatccccaaaactttcgtcctggccaggcatggtggctcactcctgtaatcccagcactttgggaggccaaggcgggtggatcacctgaggtcaggagttcgagaccagcctggccaacatggtaaaaccccgtctctactaaaaatacaaaaattagctgagtgtggtggtgcgcatgtgtaatcccagctacttgggaggctggggcaggaaaaacgcttgaacccgagaggcagaggttgcaatgagctgagatcgtgccattgcactccagcttgggcgatagactaagactctgtctcaagaaaaaacaaaaaaaaaacaacaaaaaaactttcttcctgctcttttacaattcctttttccctgccactgcaaacacattttcattcccaggcaaccgctgatctgattcctgtccttacagattagtttgtattttctagaatttgtctattaagggaatcatatggcatgtactcttttcttcatctggattctttcactaggcataactattttgcaatttatacatgttgctgtataatttattaatgtattaataattcctttttgttgctgaataatattccattgtcaggatatatttgttaatggacattagggttgttttcagagtttggctattacaaacaaagctgttatgaacatttacttgtgtacaagtcttcatatagacatatgtttttatttctcttagataaattactagtagtgggatggtagggtcttacggtaggtgtgtgtaattttcaaagaaatggccaagctattttccactttcactttatgagagttccagttctgtcacattttcaccaacacttgttatagtcaatcttttcaattttatccattcttgtgaaaagtggcctctcattgtgacttccgtgtacatttccctaacgactaattttgttacatttttccctcttacattattttatttacactctttgcaatcactttttctctcaatatcttgtaatcagcatataggttgtgaagtttttgagatctgcataacatagtaactatagttaataataatgtagatttcaaaattgctaagagtataggttgccaatgttcacaccacaaagaaataataagtatgagaggtgagggacatattaattagcttgattgagtcattccataattgtacatataccaaagcatcacattgtatcccctaaatatatgcattcattatttgtcaattaattaaaaataaaattataaaaagaaaataggaaagccactccgtgaactgggagaaaatatttgcaaaacatatatccagcaaaggacttgtgtatagtatagtatggttttataatatattaagaactcttacaacccaattgttaagaagacaagcaacccttccttgctcaccaggacaccgcagatcaggcatgtgatgactcccaggagtcctgccaagccgatgaggatgacagcccagaagggaaggtctggggagacaagggctggggtgagccacctcctgccacgtcccagggctccttcttggaccctatgtggcctgaggatgggcacagccctggggaagagagcttagtggctcaacacctcatgcctctgatgcccccaaaaactgggcccccagaaagccaggatccctgctatccctttactatgcctcaatagtctttgccatgggttggcaattttgatcctcatccaagactctgtgtgcctggtgctcttggacaaggcaaagcaccatcaggctaccccctccctaccctgggctggggcttctttgagacttaccagaattcccagttaagggctcatttctgttgggagaataccctagaaatgaaagaaatggagggtgcatgtgagtgtgtctttttttttttttttttctggagatggagtcttgctctgttgcccaggctagagtgcagtggcgtgatcttggctcactgcaacctctgcttcccgggttcaagcaattctcctgcttcagcctcccaagtagctgagattacaggtgcccgccaaaatgcctggctaatttttgtatgtagtgatggagttttaccatgttggccaggctggtcttgaactcctgacctcatgatccacccacctcggtctcccaaagtgctgggattacaggcgtgagccaccgcgcccggccaagtgtgtcttattcttttaaatacaattttacaagcgtacaaaaaagcagagagaagagtataataaatatgcatcacctagatttagtggtttatatttcctccaactaaaacatatacatccaatttatgatttattgacatttcagtgaaagtaaatgttttcactgaagttttagaggccagtagacaccatgacatctcaccccaaatatttcaatttgtatctctaaaaaaatgacacatggctacataagcccaaagccattattccaccacaagagtgtcataagttaaattcatgcctctgggcatggtggacctaaattgggctgggcccaagggcagtggtggagagaatggatcatcgcagttggaaactgatgggacctctctaagttttaaaattttcacccaaaaggtttttcttctgcctaaaaacacatttaagctctccttcacttggtggttttatcgtcatcttttagaattcaccttcaatgtcatttcctccaggaagccttccctgatgaccacacccatgtatgaataggttcacatcaaataatttataattgacaactgcctgttcttgttattcctcacgacagcataaactccatgaagacagggatgtaaagccatcatcaggcatggcgagaagggttactggttcctctacttctacaaccctgttatagccaactttttttttttctcaagatagagtctcactctgtcacccaggctggagtgcaatgatgtgatctcgtctcactgcaacctccgcctcctgggttcaagtgattctcctgcctcagcttcctgagtagctgggattacaggcgcaccaccatgcctgggtaattttttgtatttttagtagaggcagggttttaccatgttggccaggctggtttttaactcctgacctcgtgatccgcctgcctcggcctcccaaagtgctgggattacaggtgtgagccactgcgcccagcccatagccagcttcttaaagatgtagaagacataccaatggctaacaagcatatgaaaaaatgctcgacattactaataatcagagaaatacagattaaaaccatgatgagataccaccttacgccagtcagaatggctgttactaaaaagacaaaaaataacagatgttaaaaaggatgcaagaaaagtgaaccgttacacactgttggtgggaatgtaatttagtataatctctatgaaaaacgtggagatttctcaaataactaaaaatgaaactaccatttgatccaggaatcccacgactgggtatctacacaaaggaaaataaataattttgtcaaaaagacacctgaacctgtgtgtttatcacaaaactattcacaatagcaaagatatggaatcaacctaagtgcccatcaatggaggactgtataaagaaaatgtgatctctctctctctctacacacacacacacacacacacacacaatgcaataccacccaggcataaaaaagaatgaaatcatgtcttttgcagcaacatggatgcaagtgaaggtcattatcttaagtcaaacaactcagatacaggaagtcaaatagcacatgtatttgactaaataatgcatagacatgtcaatgctaaataatgcataggcatggacatagagagtggaataatagacagtggaaacttggaagggttggggagtggaggagagtggatgatgagaaattactcaatgggtacaatgtacattattcaggtaatagataccctaaaagcccagacttccccactgggctataaatccatgcaacaaaattgtacttgtgccccttaaatatatacaaataataattttaaaaagtagtgtgcaatatggagcagccacaagtggctttttaaattaaaattaaataaaattaaaacttcggtatctcagttacattaaccacacttcaagcttagtaatcacacatggctttgtgctgaatagcacagatagaaacattttctatcactgcagaaagttctattggatggtactgattcaaggcaaggtttggcaaactacagcgatgctgggtccatggcctgtttttagaaagcttgtgagctgacaacaattttaattaaaaaaaaaattggggctgggtgtggtggctcacgcctgtaatcccagcactttgggaggcccaggtgggcagatcacgaggtcaggagatcgagaccatcctggtcaacatggtgaaaccctgtttctactaaaaatacaaaaaaaattagccagacatggtggcaggcgcctgtagtcccagctactcaggaggctgaggcaggaaaatggcatgaacccaggaggcggagcttgcagtgggcggagatcgtgccactgcactccagcctgggtgacagagcgagactctgtctcaaaaaaaaagaaaaaataaaaacaaataaaaaacaaaaacaaaacaaaacaataacaacaaacaaacaacaaacaaaattggtaaaacaagaaaaagaaaaacctgtgacaggcatgtgaaaggcttgttgattctgaaggatcaacagtgctctcttgcacaacaataattcggaatcaaggacagtgcacacaggcattggaaggtcccgtctaaaacgttattcgcatttgacttgaaaagaaccttgtatgaaatctagttattccttctgcaaatatgacttgagtgtttattatgtgccaggcagaatatggggttcttggaatatagtggtgaaagagcaaacagttactctctgttatattcctgatacatggtacaatgtatataactattctttgaatgggtaaaattggatatgcaaagttgagccaccttgaagccatctctggagttggaaaataggtccatcctaccacatttgttgaggatgaatcacatacaacttgaaactggaagccctcattgacctgctgaggcaggaggatcacttgtggccaggaattagagaccagtctgggcaacatagtgagaccctgtctctacaaaaaatttagaaattagcaaggcgtggtgacacgtgcctgtagttccaggtactcaggaggctgaggtgggaggatcgcttgagcccaggagttcaagactgcagtgagctatgattgcaccactgtactccattctggttaacagagcgagaccctgcctctaaaagaaaaaaacaaacacaaaaaaccagaaccagctgcagtggtgcctgcctgcctgtaatcccagcactttgggaggctgaagcaggtggcatgcttgagctcaggagttcaagaccagcctgggcaatgttgcaaaaccccatctctagaaaaaatacaaaaattatccgggtgtggtggcgcatggctgtagtcccagttacttgggaggctgaagtgggtggattgcttgagtccaggggttgaggttgcagtgagctgagatcatgtcactgcactccagcctaggtgacagagtgagaccctgtctcaaaaacaaacaaacaacacaacaacaataactaatcagggtaattgtttaacactgcagctgcctgggggtggaggagcaataccatctagggcaggcaagatgggaaccaaaaaccaagtggcttgctaagtacagagagataagaagtccagaaaggagatgtgactagcctgaggtcacagagctggccagaagagggcaaatgcctcccatatccctcgggcgtccttttctttccttcaatgatgggtaaagcttaggagaactaagccactttctcccagtctgagaaagctcgatgacgaatcaaccccaagccttcagattcccagggaaggacccaggtgaggaagtgggagcttccacctcagtcccaatgacccagggagctttaccatccacaaggacactgctcctgtccagggtgaagttctgcagctgggtaccattccgggtcatccgcagaaattcctcatagatggcaactctgtctactctccgagccagtggcgagaagttacacagggagtccaccccggtgtggtgcctgttggggacagacctggaaggggacagggataagcaaagatatctgcaattttatcatgattctaggctttctccttctaggctcttcctgcagaaactttctgcaatgatgtaaacattctatgtcggccgggcacagtggctcacgcctgtaatcccagcactttgggaggcccaggcaggcggatcatgaggtcagatcgagaccatccatacaaatcacgaggtcaggagattgagaccatccatacaaatattagctgggtgtggtggcacgtgcctgtaatcccagctacttgggaggctgaggcaggagaatcacttgaatcggggagtagagattgcagtgagacgagatcacgccactgcactctagcctggtgacagagcgagactccatctcaaaaacaaaacaaaaaacaaaaaaaaaattctacatctgcactacacaatgcagccattagtagcttcatgttgttattaaatgcttaaaatgcagctagcgtgggagaagaactgaatttctaattttattccacttaattcatttaaaaatagccacagggaggtcaggcacagtggctcatgcctgttatcccagcactttgggaggccaaggcgggtggatcacttgagatcaggagttcgagaccagcctggccaacacagtgaaaccccatctctactaaaaacacaaaaattagccggtgtggtggtgcacatccataatcccagctacttgggaggctgaggcaggagaatcgcttgaacctgggaagcggaggttgcagtgagctgagattgcgccactgcactccagcctgggcaacagagggagactccgtctcaaataaataaataaataaataaataaataaataaataaagtaatagccacagggagaacatttctggaatgttggggtaacaacttctgaatacccataaaatcaatgagaacattggccaaaatagtccaaatcaatttttccagaagtctagaagtgaaccaaaggcttgcaaaaattcgaggggtgtttagttaaggaaagtgttaaatctcagtaaaaagagcaagctttgtggcattttaacttgcattatttccacagtgctctttcaagatcctcagtattttattattattattatttgtttttttttttttgagacaggctttggctctgttgcccaggctagagtgcatggcacaatgtcagctcactgcaacctctgcctcctgggctcaagccatcctcccacctcagcctcctaagtaactgggactacagcacatgccactatgctcagctgatttttgtattttttgtagagatgggttttcaccatattgcccaggctggtctcaaactcctgagctcaagcgatctacccaccttggcctcccaaagggctgggattacagtcgcaagccactgcatccagcaagatcctcggtaactttgaaaactggcagcctcagaatcatgatatctgtgaaaaccagctgcctagcagtcaaaatagctgtagagttctccagacatcaatctgcagaacatagtcactatttgatctgtttggcagctccttgaaaaagccctattctcagggcttatctttatttgttctgattcagaatttgtttagtgaggaaagcctgttctcaaggcagttgtcaaaaaaaaaaaatcattggtaccccccaccattggaaatgatacctctcattgaaaagcacagttaggctgctagattctaagtaatctggttttagtcccctccttcccccgtcttccatgggtcctgatttcagtagctgatgtcttaatgtagtagattctacactctagactccatggcctcagcaccaggtacctttatgtctgctgagatttacaccagctctcttgagtgttgaagccagttgggctccagctttaggaaaaagctagtttttagttaacagctctctatttctagggctctcttccatcaaagctatggcttggggacacttctatttaaaggacagcagaagttcctagagtcattaggtcctgagttagaacttacctgaatgttgaaacttgacagtcagaaaaataactcttgatgctgctgtttcggaagagttggttgagctgaaagacagggcgatgtttcttaggtcagaatcctggccccagtagcatcagagaattttcagccactgagcacacttctccgtctattttgcttcttgtcatgacaaccacttgcccaggtatgtatatcaaaggacatgctcttctagggtatgacttagctgtgtgaccttgggtcagctactgaacctctctgtgcttgtgtattaaatgggaataagaacctgtctttgtggattgttataaaaagtcaccctgtggctacccagtatgcataagtcagtttctgcatggcaacagagtggacataccacccccttctcaccgcatcctcaatattccttttgttcctctggtaattggtggtgcctggctgggctttgtcctgggaatatggtaggttggtgatggtgaaattcaggtagaagtgctgggtgctggagctgcttgttggttgataaactgatgactccatttctagaattaaaaaaaaagtatgtaaaaatccactatcaaggcagggttttaagaaagagatgattccagctagcttacttattcctgacagtgtgagctgagctaggcttttctttttttcttttctttttttttttttttttttttggcaggggggtcatttgttttgttttttgagacagtttcactctctttgcccaggctggagtgtaatggcgtgatcttggctcaccacaacctccacctcctgggtgcaagccattctcctgcctcagcctcccgagtagcgggattacaggcatgcgccaccctgcctggctaacttttttttttttttgtatttttaatagagacagggtttctccatgttggtcagactggtctcgaacccccgacctcaggtgatccacccgccttggcctcccaaagtgctgggattacaggtgtgagccaccgcgcctggctgagctaggattttaaaggtgggatggagggttttaggtaacagctctatattggatggaggatcttcctccatccatctgtccagcttgtatccatccacccatctacctgttcaattctctttctaccaagcattgtaagaattctctacaacatgggggaaaagagactgggtttctctgggggtgtagtcagcaattgcaggtgctgagaaacccagagtcttctaactaatgatcattgttcctaaagggtcttcttgcctttgctcttctctccccccaccctccattctgcacacagcacccagaggatgagcagaattcatttcattttctttctaaagcagaactcatgagtgtgtcatgttcctccccaagccattccagtgcccaacaaagtctctgcccacatctttggcttcaactgtcacctctccagtatcaaagtggatgctccagctacaccaatcttcttaaacttgccccaaaatgccactttttttttttttgaaatgcagttttgctctttttgcccaggcttgagtgcaatggcacaatctcggctcactgcaacctccgcctcccgagttcaagcagttctcctctctcagcctcccaagtggctgggattacaggcacgcaccaccatgcctggctaatttttgtatttttagcagagatggggtttcatcatattggtcaggctggtcttgaactcctgacctcaggtgatccacccatctcagcctctgaaagtgctgggactacaggcgtgagccaccgcacccggccagatgccatattctttctatcttctaggttatagatgcatggagcacaattctccatctattacccctggctaggtcccattctctgtcagatctcagcttcttcaccccttcctacataaaactttccaagacaaggttgtgtgttcctccttggggctcccacaggcccctgaaattcccttatcatagcaatgatcacactgtgttatcagtacgtgtttacttccattgtttatttattttttatttttatttatttatttatttttgagacagagtctccatctgtcgcccaggctggagtgcagtggcgcgatctcggctcactgcaagctctgcctcccgggttcacgccattctcctgcctcagcctcccgagtagctgcgactacaggtggccaccaccatgcctggctaattttttttgtatttttagtagagacagggtttcaccgtgttagccaggatggtctcaatctcctgacctcgtgatctgcctgcctgggcctcccaaagtactggtattacaggcgtgagccaccatgcccggcctacttccattgtttattgaatgaatgaattattcatttactgattcattcatttaattgatcattttaattgatcaattaatcaattaaatcaattctcaattacatcaattaatcaattatgtactgaatcatttattattcattaattaaatgaatgaatcaataaattgattcaaaataaatgatctattgattcattcattcaacacaattctttttacatgtaaaaatagctattctcttagatgcaatggctggtgttctgttcctgcctcgttggatgatctactgccagaggtcacctacatgggtctccagaaagcctccctttccctctctagagcctccaccaattccactggtaccgagaagccccatctttcctcataaccccacctcttccagttaggaaaccagccaccccaccttgtacctgtcacatggatgtccaccaactggtaggtggagcccagccaatggaatgaggcattcagggtcttatctagaaagacttgctccaccaggctggggtccaaattggaggagaacaatgccttgacagtgaccaacacggagtccatcctagggacagagaccacaggaattcagccagtactcagcatcagcagggtcatcggttgctgtctttaaagagcaaaagatctagaggcacccaccctcagtctagagaagggttctgatcaaaatgggaggccttcggctggatgcagtggcccaagcctgtaatctcagcactttgggaggccgaggcaggcaaattgcctgaggtcaggagttcgagaccagcctgaccaacatggcaaaaccctgtctctaataaaaatacaaaacttcaccgggtgtggtggcgcatgcctgtagtccctgctacatggggggctgaggcaggagaattgcttgaacccaggaggcagttgtagtgagccgagatcataccactgcactccagcctgagcaacagagcatgactccatctcaaaaaaaaaaaaaaaaaaaatgcttccaggaattacgtctagaagcaataacagtaacaataatcgatatttattgaacactttttatagatcaagaccactaagaagtgacttatgcattcttcatcatcactctggtggaaggtattgttaaaattatcccaatttctcccacattttccctcttgatttctactttttattattttattttattttttgagatagagtctcgctctgtcacccaggctggagtacagcctcctaggctcaggcgatcctcccacctcagcttcctgagtggctgggactacaggtgtgtgccaccatgcctggctaatttttgtattttttgtagagactaggactccctatgttgccctcgctggtcttgaacttctgggctcaagagatccacctgccctggcctcccaaagtgctgggattacaggcatgagccactgtgcccagcctacttttgattttatttgtttttaattttttggggtacatagtaggtgtttttatatttatggggtatatgagatgttttgatacaagcatgtaatgcataataatcatcagggtaaatggggtatccatcccctcaagcatatatcctttgtgttgcaaacaatccaagcatacacctttagttatattttaaaatgtacagtgaagttatttttgactacagtcaccctgttgtgctagcaaatactaggtcttattcattctttgcatttttttgttccaattaaccttctccatattcccagctgaaatacaaaaatctttgaagtttagaaatatacaaagtcagccctgtgtcctgtgaccctcctcttcccaagtataggtatcttcattccttcatccagtcatcagagacctgggttcaaatcccaactttgacagttcttgggaagttcacttttctgaccctcagttttcccatctgcacaatagggatgatttttgcactcaactcatagattctgttgtgagaattaaatgagaggaggctggttgatgttaaatattattattgggctaatattttgagttctacatcaaaaagttatattttcccaagtgtccagaaaaaaaagaaggtgtatgctgggagttggtggccccatgaggttaatcctcactccctaccttgaggatttatgggaggagatggtaggattagctagacagggatgtaggggagaatgggtaccccactggggacgtctagctcaagggtgctcagagacacagccacaagcttggtcactgcttatgaccttcagaacttacgtcaagttggtgaccaggcagaagcggaatgtgtcatgtagttgactgcctttgtagagtgtggtgacctagaaagatgggtagggagagtgggtgagatggaggcctcttgggggtggaggggccgctgatgccagtggaaaaaaacacaggacttggagcaaaggggaccagagttcaaatcctaactctgttcctaaagcactgtatgaccctaggcacaccacgcccctttctgagcctcagtttgcccatctgtgaaatgggaatggtagtcaagagagtacttttggaaactgagagagaacccagaatacatagtgaagtgaagcatttaaagtgatcacttaacagagaaatcaggtagaagagggagagaagcacacaggacagagaagacgggaggggtgagagatgccccaccttgtcctggatgtccctcagcagggtgatgtactctgaggatgtggggtctggattactgaggttccagttgacaatgtggaaatttatctggtactcgccccggattgataaattctggggtgcatagcctggagccacagagaagaagaaaaggcaacatatggtggggaaatgttgatcacaaaatgcagagccaaagttgcccagcagtcccctgcctactgtcagaatcaatttcaggtccacacgctgggcattgcaggagctcttagacagaaagttgccccaaagagagggaaaaatggaatattacacagattcttctgagctgagctttcctgcatgtgctatgcagttcccacttctaggaatgcatccttttcatttcctgcaaaactcctgctcacgcttcaagagcccagtgagagggagctccaggacagcagaggcccaagtctgtcttattcattattgtgtcccggcacagggccgggtatataacaccctcctccaggaagccctccttaatttactcctcctctcagctcccatagtaccctgttaataacagcagtggggtctttgttgtgcccgtaatttgttgttaacttgagtatgagtttttcagagacagaaaaatgtgtcttctatctccagacccagtacaaggcttggggcagaacagccacccatatatgtttgctgaatgaatgaattaatgaatgtgagttacagcagagacacaaatctttaatttgctcactcattcaatgattctttccatactatgatgtgctgatgtactgcgaaccgagggtacagtggcactcataatagaccgtaattttgttgagttcacagggtaagggggaatcagataatttaacaagtaattacagtaaagtgtgataaatgtcagccttgtgcccacctaagaactttgagaccatgtacaacaggatttctcacccttgaaattattggcatttggggctggatcattccctggggtggttgtctcctgtgcactggaaaatgggctaccgacccactaggtgccagttgcaccctccttccctccctgagttgtgatacccaaaaatgatttcggatattgcctagagtctcccagttggggggtggggtggggcagaagtgcagaattgtcccctggtaataaccactgacacagaggatccttatatagaagggacctgctatcctgtcccaaaggatgccacgactcagccacttgggttttgaattgaaattcattatggatgtacctggggggggttcattatgctaagtgaaatataccagatagagagaaacaaatactgcatgatctcacttatatgtgggatcagaagtcaaacttacagaagcagagagtagcatgatggttatcaggggctgggggcatgggggtggtgatagagaaaatggggagatgttggtcacaaaatacaaacttttagttacaagatgaataagttctggggatcgagtataaagcttgatgattatagttaataatactgtattgtaaacctgaaattttctatgagggtagaccttaaatgttctctttctctctaactcacacagacgcacacagacacacggtaactatgtgacatgaaagcagtgttaactaatttgatcatggtaatcatttcataagctacacatatattaaatcactgcattatacatcttaaatacatacaattgtatttgatagttataccgcaaccaagttggaaacaaaagtgaaggagaaagagacaaacaatttatgacattaatttggtcaaagaatttcatgctatttactcaaaataatgggaaagaccctccccttggtggtttggggaagggtgtcccccagccaggccttgggctattttttttagagaggaaagggcatacaacagggacaaataatagtcatggtgggccgggcatggtggctcatgcctgtaatcctggcactttgggaggccaaggcaggtggatcacctgaggtcaggagttcgagaccagcctgggcaacatggtgaaaccccatctctactaaaaatacaaaaattagctgagcgtggtggcatgcacctgtaaatcccagctacttgggaggctgaggcaggagaatcactgttgcagagccaagattgcaccattgcactccagcctgggtgatagagtgagactccatctcaaaaacaaagaaaccaactccccaaaagtcactgtaaatccaagttcagcctgacactcaccattgatgaagaggctatccctgtccaggacatagaagcccagttgggtgacaccatgggtcagctgactcagctcccagtaaagctgctgtatgtccagcccggggcccacagggtcagggtggtaggtgcaggtggtgtccacaccagtggctgccccatccttctcaggcctggggagagaggcatttgaggactctagagaggtcccgagacctctgcaggtaaagagcagtggagggaggagcaggggaaagctgaggaaggggtggtcacaaaaggggtggttgttactggcaaatggccaggaagtggtctcacctgagggagatcagttggcaacccaagtagaaggggcccatgctgctcttctggaacaagggtctgagcttgagaggaaggaggaagagggtaagccgaggaacagaggttgggggtaggatttatcccaccaggagctgctgggaccagggtctcaccaggtgctgaaggaccccctcggtggagttgaatgtagctgagcccttgcccatatctggtgaatactggagattggagatggtgaagttgagtgtgagggtcttcaggtggtaccccatggctgcaggaggggaggagagacgtctgcaactgagggctggtctgagactagatcagactgcgctcattattaactagtgtggccatccaagtcagaagctatgtgtcttctcccctccaagtaacaccaattctctttactgaatattcatcacatatatcctctctctcctcccctatcccagttcaggtcttattttctctcaccctgattagcacctggcagactcactggatgccctgtctaaaggacattctctatactgaacacaagaagaatctttctgaaatgacaatctcactatggctgcccctgctctagtaccatccacagctccctatggccttcagtgttaagttcaaatttcttgacttggcattcaaggcccttcccaatctggctcctgctgacctttcagtctcacttatccatccactctgggttaagctttatgtttcatgcaaaccaaatttctctcacttctccctatactctatgctgtttctggccactgaggctttgctcacagattcccctctttcagttatactattcatgccctatttgcctgaatcactcttagtcatccttaaagactcagttcaggtgaaactttctccagaaagccctcctccttcccaactatgccaggtatctcaccccaaaacatctgacattatgatggtctatttatttcataaaatctgggactccacgagggcaggtgtctgattgaaatgctattctaatcttcgaggaggaaaaatggccccaaatacctgttgtggcttctgacagaggaggcaggaatgtggtggctggcttgggagctgtggaaggaacagtccatcagagaggacaaaagcccaccacctagtgggagaagctcccctgggcttcatcagtggtccaagccaggacaaccattcacaggtgggccataaatgagactgagggaaggagtgattgtgtgagtggaggagtgagcaagatggatggatggatggatggataaaaggacaggtggaaggaaggacaagcaggtgaatgggcaagaggatgagtgggtggatgggcagatggatgaatggatggaaggacagaaggaaggaaagacaagcagatgaataggcaggaggatggatggagagatggagggatggttggaaggacagaaggaaggacaaacaggtgaatggggaaaaggatagatggatggatgatggatggatggatggttggaaggacagaaagaaggacaaacaggtgaatggggagaaggatagatggatggatggatgggtggatggatggataaaaggacagatggaaggaaggacaattgagtgaatggggaggagaatggggggagagatggctggctggatagatggatggatggaaagacagaaataaggaaacaggtgaatgaagaggagaatgaatggagagatgggtggatggttggaaggacagaaggaaagacaaaccagtgaatagggagaaggatggatggatggatggtggatggatggagagatggataaaagacagatagaaggaaggacaagcaggtgaatgggcaggaagatgggtggatggatggatggaaggacagaaggaaggaggggctagcgagtgagtgggcagaaggatgggtgggtggtggatgagtggatgggtggatggatggatggatggatggatggatgtatagaaggacagaagaaaggagggacaagcaggtgaatgggcaggaggatgggtgatggatgaatagatggataaaaggacagatggaaggaaggacgaggaggtaaatggtcaggaaaatggggtggatggatggatgggtaaatggatggacggatggatggatggaaggacaggtggtgtctgagagatgactggaaggatagaaaaatggatggctggaaagatagacgagtggatcactggatgaggcaatgggcaaatttagccaaaaccagtagccagcagagtctgcagcttgaccatgaagcctctgctggggcacttggaggagattttcttatcaggaggtacagactaacaaggtcatcatctgacctcaacctctatccctgtagggaatgcttgttcaaacttcttcctccaacccagagggacatggaaaattcacaaagccaagactatggctgcaggtctaaaaacaggccaaggactcagcattcttcctcccactgagacaatgcccctcaccacctcaggggaccagcccgaatttggggcaaccttccttcatgaatgaggagaaaagcttgaaccaagacccatggagattgaaatgggcactagattcaaagacacgtacttgtaggaggctcatctggaccaggttcattgtaaccttgaaacaaagaagtcacacgtaagaggaggtggtggaaccgtcccagatactccatgcctttgtccatatggggcccctgcctggatgcctttccctttgtgtatctagagattatggatacatttatgtatcatctaatatttgacttaaatgtgttcaccactagaaagaatttcctgatatttcaattagcactgacccttccctactcacgtctccagcatgcctccaatgagaggctctcactacctttgtgttcacaagtctatcctcctatccatccataacccccgcctccccttccaggcctcctccaatctattcctccacccaatgaatgtttattaagggcttagtatgtgcaaggctccctttacatttggggaatatagggtagaacaaaacagtctccgcccccctggagattacattaggacaggatgcacatgtaacctatctctgttcctggggcgaggcacattgtggcctggttaatagtagctgcttggtaaatctaaatgaaggaacaaaatgaagcacataagctgtgcagtttacaagggggaacagctccctgcaatagccaagttgaagggactggatgttaactgagatcatcaagacccaacccgcacctgtgtgtttatcacagcactattcacaatagcagagatgtggaatcaacctatatgtccatcagcagatgaatccataaagaaagtgtggtatatatgcacaatggaacactattcagccataaagagaaataaaaccatgctgctgaggttgcagataaaaaggagtgtttatacactgttggtgggagtgtaaattagttcatccactgtagaaagcagcaggatgattcctcaaagagctaaaaacagaactaccgtctgacccagcaatctcatcactgcatatatgcccaaaggcatataaatttttctatcataaagacacctgttcactgaagcactattcacaatagcaaagacatggaatctacttaaatgcccatcaaggatagactggataaagaaaatgaggaacatatacaccatggaatactatgcagctataaaaaagaatgagatcatgtccgttgcaggaacatggttggagctggaggtcattatccttaccaaactaatgcaggaacagaaaaccaaatactgcctcttctcacttataagtgggagctaaatgatgagaacacatggacacatagaggggaacaacacacactggggcctgcctgaggttggagggtggcgggtggcgggtggagggtgggaggagggagaggatcagaaaaaataactaatgggtactaggcttaatacttgggtggtgatgaaataatctgtacaacaaacccctgtgacatgagtttaaccatatagaaaatctgcacgtgtatgtctgaacttaaaagttagaaaaaaagaatgaatccatgtcttttgcagcaacatggatgaaactgaagttaccttaagtgaaacaagtcagacacagacagacaaatatcacatgttctcaatcataagtgggagctaaacaatgtgtagacaagaactcagagaggggaatgatagataaagggggcttggaagggtgagggggtaggagcaaggtggatgatgagaaaggactaaatggatacaatgtatgttattggagtggtggatactctgaaagctctgacttcactactgtgccatctatgcatgtaacaaaattgcacttgtaccccataactgtatacatacaacgatgatcatgaggaggatagtaataataataataaagaacatcaagacccagactagccaaaaactcgctgtgggcatgggcaagtcccttcccttctctgtgcctcagtttccctctttgctaaaataagagtaatgaaagcccaggatgtctctccacatcccggtacctacctaaaggtacctcatataagtgatatggggtgcccacctcatggggtcatgatgataagcactgttcttgggttggcggtggaggggatgaaaggcgagctattttgtcaattctccacggtcatgctttgcctctcagaaccccatttaggggatgccttcttaaatgctatcttatcctgagttctagaccaatgctgaggcccagtgtgcctgaagattagatcccatagatcttcctggtatagggggcctcaggtaggagagaagcccatccctcgtcaatggtgagaagaaagcagggaggggaaattgttttgttttgttttgagacagagtcttgctctgtcaccaggctggagtgcaatggcacaattttggctcactgcaacctctgccttctgggttcaagcgattctcctgcctcagcctcccgagtaggtgggactacaggcgtgcgccaccacacccagctaatttttgtatttttagtagagacagggtttcactatgttgtccagggtggtctcaatctcttgaccttgtgatccgcccgccttggcctcccaaagtgctgggattacaggtgtgagccactgctcacagccggaaatgtgttttttgtcccccaagtgcccccaccaggaagactcttctgtgagttaaacatgtggagtggatcatagcaccgaatgctgacaagtggagttcatatcctggttccaccactgtcaaggtaaattgcttagcctgtctaagcctcagtttcttcatctgtaaaatgggattaatcaaagtccaaccttgcattgtggttatgggagggccagtggtaatgccaagacttgaaccccaagtctttccctagagaaccggcaaacagacaccctcctggactgcagtgggggctggggggtggggcagggagatggggctgatagctgctcaccgttaaggtagaggctgtctttgtccagagagtaggggcccagccgggtgatgccatgggtctgctggctcagctcatggaacacctgcttgataggcagacctgggccgctgaggggctgcaggtaggtgcagaggaggtccacccgtgtctcagcaccgttcttcacagacctgaggagggagaggtgcagctttgggggatgaaggccacctagcacctctccacttgtggtcactgcacaactcacagtccatattttggtctcattgacagtttgcactttctccacctgaccttatctatcatctcaggatctttgcaattgctgttacttttgtctggaagcttctccccatttctccttacctggataacttcctggtcatcctccaggtctcagcttagaggactccctcctcctcctcctcctcctcttcctcctcctcttcctcctcctcttcctcctcctatcttcctaggcaaggtcaggagcctcctctgggtcccacaatcctccactcttcccctgtcactgccctggtcaccctctatgtaatcataaattatttgttcctgttcctaccagaacatggtctccacgaaggaggaaatgaaccagtttagcttactcttattatattgaagccccagaacccagcaccccttgacaactccctgcaaaaatcaaagtcctaatgaatggagaaacacaatacagcatttacatacaagtggaaaaggaagggaattctgacacatgctacaacatggatgaactttgaggacattatgcttggtgaaataagccagccatacagtataaaccaggacatataccatatgattcctccattcataggaggtcctcagaatcatcagattcacagagacagaaagtagaatggtgggtgccagaggcttgaggagggggatgaggaatgagtgtttcatggggatggagtttcagtttgggaagatgagaaagttctggagatggatgatagtggtgatggttgcacaataatgtgaatgtgcttgatgccactgaacgggaaatatagctaaaatgatcaatttaatgtgatgtgtatgttaccacaatatagaaaaaaaaaatccaagccaggtgcagtggctcacacctataatcccagcactttgggaggccgaggcggtcggatcacctgaggtcgggagttcgagaccagcctgaccaacatggagaagccccatttctactaaaaatacaaaattagccaggtgtggtggcacatgcctgtaaccccagctactcgggaggctgaggcagaggaatcgtttgaacccaggaggcggaggttgtggtgagccgagatcatgcctgggcaacaagaacaaagctgtcttaaaaaaaaaaatccaagtcctccaaggcccttcaaacttgctgatgtcttgagtctcatcctttctctcttttcttcttgctctctctctgctccagccacactggcctctttgctgttcatagaacatgccaagctcatttgcacctcaagaccttttctcatgctgttctccctgcctggaacagttttcatggccatttgggacacagcccaagattcatcctgggtaaagttgctctacccatcacttgctatttatttatgtttcatatcactttactccatttgaagccattttacttagatatttatgttcctgtttagcatctgttcttctccactgggtgagggcagggacagcatctgtcttatcactctagtacccagcacctgcctcagaggagcggtgccatgggcatcagttgactaaaaatataaatggagaagtaaatagtaaataccaagagagtgcaaactgacccaaagaagtcaagttggcaaggatgcaagaaaaggaactcttatacatggttggtgggaatggtagaggagtggtgttatgggcatgggttgagtaaaaatataaatggagaagtatctagtaaataccatgagagtgcaaaccaacccagaaaactcaagttggcaaggatgcactgaaaggaaacctttttttttttttttttttttgagatggagtctcgctctgtcgcctaggttgaagtgtgcagtggtgcgatctcagctcactgcaagccccgccttcagggttcatgccattctcctgcctcagcctctccagtagctgggactacaggcacccgccaccacgcccggctaattttttgcatttttagtagagacggggtttcaccatgttagccagggtggtctcgatctcctgacctcatgatccacccacctgggcctcgcaaagtgctgggattacaggcataagccaccatgcccggcctaggaaactcttatacactgttggtgggaatgtaaattagtacaacctcaaatgaaaaacagtatggagatttctcaaaaaacaaaaaaaaaaaatcagaactaccatttgacccagcaatcccactgttggggatctacccaatggaaaagtattagaaataaatagtggtgatggctgtatgacattgtgaatataatcaatgtcactgaattgtacatttaaaaatggttaaaatggcagattttatgttacatgtatttttgccacaatataaaaaaaatgtgatcttaaatagatgcagaaaaggaccctctgagaatagctcaacccatatatatctaaaagaaatgaggccatgtgtggtggttcatgcctgtaaaatcccagcacttcaggaggctgaggcaggtggatcacttgaggccaggaatttgagaccagcctggccaacatggcaaaaccccgtctctactaaaaatgcaaaaaaatttagcctggtgtggtgttgggcgcctgtaatccttgctacctgggaggctgaggcacgagaatcgcttgaacccgggaggcacaggttgtggtgagtgaagattgcaccactgcacttcagcctgggcagcaagagcaaaactccctgggaggttgaggcacgagaatcgcttgaactcaggaggcagagtttgcagtgagccaagattgcaccactgtactccagcttgagcgacagagtcagactctgtctcagaaaaaaaaaaaagagaagaaagaaagaaatgaaaccagtatcttaaagagatatctgcactcctatgttcattgcagcactattcaaaatagccaagatatggaaacaagctaaatgaccttcaatggatgaatgggtaaagaaaatgtggcatacacatatacaatgaaatatataagaaagatgaaaatcctgccacttgggataacatagatggagctggaggacattaggctaagtgaaataagccaggcacagaaagacaaataccgcataatctaacttataggtggaatctaaaattgtcagactcatagaagcagagagtaggatggtggttgccaggggctgggaggaggagcaaatggggtgatgctggtcaaagggtacaaacatgataactatgtagagataatagatatattaattagctgaaatgtggccatgatttaacaatgtataccaaaatatcaagttgtacactttaaatgcaagcaatttttatatgtcaaaaatcaaactgtcatgaataaataaaaaagttattaataccagtcagaataactattactaaaaagacaaaaaccaaccaaccaaccaaacaaacaacaaacaaccagatgctggcaagaataaaagaaaagggaactcttatacactgttggtgggaatccaaattagtacaatctatggaaaatggtatgaggatttctcaaagaacaaaaatgtagaactaccatttgacccagcaatcccactattggggatctacccaataaaagaaatcgttatatcaaaaaaaaagaaagaaaaaaagaaatcattatataaaaaagacacctgcacgtgtatgtttattgcagcactattcacagcaaaggtatggacccaacctaagtgtccatcagtagaagactggataaagaaaatgtggtatatatatataccacgaaatactattcagccataaaaagagtgaaatcatgtattttgcagcaacatggatggaatgggagtccattatcttaagtgaaactcagaaatagtcaaataccgcatgctctcacttataagtgggagccaatggactccatgtccattagctcatggtggaataccatacgttctcacttatacgtgagagcatggacctggagtgtggaataatagacactggatactcagaaaggtgggagagtgggagaagggtggggaacctcacttaataagtacaatgtacactattcgggtgatacaccagaagctactgtctggaagtctactgtctgcagacttcactatggaatatatgcatgtaacaaaaactgcatttgcactccttaaattcatttaaaaaaaaagaatggggccagatatggtggctcacgcctgtaatcccagcactttgggaggctgaggagggtggatcacctgaagtcaggagttcaagaccagcctgatcaacatggagacaccccatctctactaaaaatacaaaacaattagccaggcatggtggtgcctgcctgtaatcccagctactggggaggctgaggcaggataatcacttgaacccgggaggcagaggttgcagtgagccaagatcgtgccattgcactctagcctgggcaacgagagcgaaacttcatctcaaaaaaaaaaaaaggaaagataaaaagatttaaaaaaatatgtagcccaccccaacccaagagggacctcccagtcagaactctaagttcttggtggtgcgctgtgggtgggggagtttctcaccttagtgcgatgaccctgcagcctgtgtaccgtgcacccaggctgctcctctggaacaaaggactgagctgcagagggagaagggagcttgggttggtcagaggcaggcaggcaacagccctaggatgggcatggcagggctgcagcgggaggcaggcctctcaccaggtgctgcatgacgttgtctgtgatgttgaacttgagggagccgggttggcccatgtccgccatgtagcgcaggttgttgatggtgaagttcagtgtgaatggctcctcgctgaccaccccggctagggcagggggaagagagagagagatgaagctcttggggaggatgatgggtgggtggggggtggtgtgggacagggtgggggcagtgtgttctaaggaccctgtgtccgcctcttaataaacccaacggtgacttttaatggagacaactccagcagccagtaagggtgtgcttaatgatttgggatgtccagatggggtccttctacccaaatgcaggaagggaagattctgtaaaaagtaccaatggttctgatctttcccagggtaaaggctgcatattaccacactgatgcggaagtcatgactctagacatttttaaaaaatttattctctctctctctcttcctctctccccatcgatccttctctgcctttctcccatttctctctctctcctgcactcacaaccaggtatgctaatcttctatgcattggttaacatggccaacaatctttgcagccataaccaacctctcagcacttcagtttactcatctgtaaaatgagatgacaatggttcacaatgatgtttcctgcctcaaccgttgttatgaagcttaaacaagttaatcattgtaaatcatgtaagcactgctgggcacacaggtcaatatggtgtacatgtttattatataaaatatatcagcaaatgctttctaatcactccctgtgtgtggaactttatgaaagtatgagttaaggtttttttttttgttttggtttggttttgttttttgtttttgtttttttgttttgtttttgtttgagacagagtctcactttgtcgcccaggctagagtgcagtggtgtgatcttggctcactgcaagctctgcctcccaggttttatgccattctcctgcctcagcctcctgagtagctgggaccacaggcatgcaccaccacacctgactaaattttttttgtatttttagtagagacagggtttcaccgtgttagccaggatggtcttgatctcctgacctcatgatccacccgcctcggcctcccaaagtgctgggattacaggcgtgaaccacagtgtccagccaagctaaggtttaagacaaatctctagaagaaaagtttacttctccttctctccctgcctttcttcttttcaccactcttgaacttccttctgttcattcttccttctctctttccatcctttcttcttcccttccatctttcattctattaatgcatcctttctttcttgctggcttccttcctttcattgtaccttctaacatctgtctatccttcctcttccttctctcacttctttccttcctttcacccatccatccatttatccatccatccatccatccatccattcacttatccatccatctatccatccatccacctacccacccatctgtccatccatccatccatccacctacccatttatccatccatccatctatccacccacccatctgttcatccatctgtccatccatccattcatcccttcacccactcacccactgatccattcatccatccatcatcaatctttcctttcttacacctctcttttcttccttccatctacttatccatctttcctcctccttttttctttcatccatttttttctttcttcaatccactcatccatcctctctcccttcctccttccatttatcacttcttctttccatctgtcacttcttccttccatctatccaccttgccttccttccatatatacagtattggtcctacaccgctccaggaacattggaaggggagcaggggggcggggtacagaaatactctggcccttccatagccccgcccaccattgtcccaccaatgcctcctattggctgaacctaacaggaagctagttagcatgggagcctgggaaatgtagttttcatgagtcagacgtctatcccacagagcacgggaaggctggaggaggttggagaatggatccgaggacaaaaacaaaacaaaacaaaacaaaacaaaacaaaaacccatatgtggtataatagagaaagcccataagaagtcacattcctataaaagagaagcagacaacagaatataaacaaatgagttcaaaaaagtgggagaagtattgtgaaggattaacagaaaaaaaaaaccccaggatctcatttggaagtaggagtgagacaaattcgtataagaaattgacttttccttcacagtcagtagagtaaacagacaacccacagagtgggagaaaatcttcacaatctatatatccaacaaaggactaatatctagaatctacaacgaactcaaacaaattggcaagaaaaaaacaatcccatcaaaaagtgggctaaggacataaatagacagttgttgaaagaatatatacaaatggctaatgaacatatgaaaaaaatgttcaacatcactaatgaccagggaaatcaaaaccataaggtgataccaccttacttctgcaagaattgccacaatcaaaacatcaaaaaataacagatgtgtgactctgggggccaagatggtcgactataagcagcagcgctcagaggctcacattgaaaaaaactgtaataagtgtgtgatccttcctggcaaccaaaatgtccaggttccctcatcaaaattgactagaaggctggcagtgacccacagagagaaggaagagcagtgtggtgtggtggcccacctgagagacacacggggaaggggaaccccctccttccagccaagggaggtggtgagtgagcgggctacccaagagggggaaactgtgctttttccacggaactgtgcaactcacagattggaagatctcactcgcgaacccatgccactgggacctagtgtcccaaccccagaacacgcagattcttacagctggaatctgcctaagcctacggaactccccgggggaggggcgaccagcactggctgcggctgcctgctaagtcttttttgttccttggggaaggggcgacagccagcactggactcacaactgcctaacacgctaagctccctgggcgggggaagggcggcacccctttcaatagctccaggctgtacttttcccctgctagagccgggtaggctggacggcttggtcccaagacttgtccccacagcccaacacaccggctgtggcagtctgcagccagagtgcctcttcagggctaaccctgacccatccttcctcagtgggcagagcttccttgcaggatctccaaagactccagccagaggctcagagacagaatttggactccctgggcttgggcccctagtgggagggatggctgtagtctctgtggaccagcagacttagcctctcctctggtagttctgaggaatccaagcagcccagacatgtggtttccccccagtgaagaaccccctctccaccaggggacaaagtgcttcattaaatgggtcctgctctccatgccagtcaactgggcgaaaccctccaacaatagttgtcagacaccctacacaggagcgatcctactggcatcaggttggtgtccctcgaggtcagaggtcccagaagaagcaggcacctatgttcgctgctctccaagcctccttgagtgacacctccagacatgggagcgaatcagatgaatagggcctgaagtgaacccctagcaaactgcagcagccctacagaagagggacctgactattgaaagaaaaacaagcagaaagtgacaataacatcatcatcatcaacaacaacaaccaaaagacccccataaaaaccccatccaaggatcagcagcctcaaagcctgaaactaaaactcctgaagatgggaaataatcaacaaaaaaatgctgaaaacccaaaaggccagagtgcctcttttcctccaaatgaccgcaacatctctccattaagggtgcagaactggatggaggatcagatggatgaattgacagaagtaggcttcagaagatgggcaataaaaaagtacgatgagctaaaggagcatgttctaatgcaatgcaaagctaagcaccttgatgaaaggttaaaggaattgctaactagaataaccagtttagagaggaacataaaccaaccgatggagctgaaaaacacagcacaaaaacttcgtgaagcatacataagtatcaacagccaaatcgaccaagtggaagaaaggatatcagcaatgaccaagctgagcctgagctgagccttctaggaaaaccaaagagccaactacacatcatcaaggaacctaactctcttgaattctgtcccataatcctgagtcagctccaattgaattggtagcgactgaattttttttttttggtaaccattctgaagctgttttgaactgagagaaaatgaatgctattatcaattggtgatgtctgccatgaatgctgcaatcaattaatgatgtctgtcatggatgagggagtggagcagatgccatatagttttccagtgtaaactctggcagacactaaagttgaaccaaggcagaagaggaaagtttccatacattataagaaagcatacttcattccttccttccctgggaaaatccatattttcctgtagatctaaatctgtcgatctaccatgtacaaggtcctgaagcagatactagggaagcacaagggagtaagacacagttgctccaatcagcaggtttatgcactattggggtgactggatataaacacaatgttcaaagcagagaaactgtgtttgcaattgacttaaaaaatatgcaataggacttaaagtgagtgacaaaataaaaggttcccatgattcttctgcctataataattcaagattttttttagaaatcatattaaatagtactagttaaacactgagcatagcactttggtgcatattcagtagccaataagttcatatattatccattaactttgttatcaccaccaccatcataatcatcaccatccctgtcaccatcaccatcattattgtcataatcaccaccatcattaccaacatcaccatcatcatcattaccatcatcaccaccaccatcaccattgtcatcatggtcataatcaccatcaacatcatcatcattgccaccatcagtatcatcataaaaatagctctctgagaggagagattattaattgtttcatgatccatgccatatccccaggatttggcagagccccagggcttgtcacaatgctcaataaagtttgttggttggctcatcatcactagatttataaagaatttccatctttatttgactgaataatggaagagatgtttacactcatcagccatgctctaacagaggtgccattggctggtacttattcaagggaccagtagaaggggtggatccccagagtttcccaggtccactgtggtagtcccaagagctacagagaaaccctcttcaggggaagcatccaagcctctcatggcagaaaggtcagcaaataaaactatttacaggccttgctgcatatcgggcctgagctgggtctctctctggagctggccagaagggaaagggaataacttgtgccctcccagccccttcctttatgaagaggacataggggcataggaagacaggacagctcctgccctgcttggtgtataattggggctactggagcatcggttgaatactcactgctggtggtgggtacagagctccgatgggtgaaacctgcacagagaaggagggaggagagtgggtaagggttaagggagaggtggggaatcaaataggggtcacagataccctagtggaatggaagaagtttcaaggaacaggggcctttgaagattctctatcagtaccctcagatcagggaagaaggtactgaggatgaactcagtccaagatgaagaaactatgaagttcagacatcagtcatcacatacagacaacatagccaagacgtcaatggccagtcagggagtgtgacctcaagtcagagagtaagaagctgtccagcaaagaggaagaatctccaaccacatcacagccgctcaccattgacatagagactgtccctgtccagtgtgtaggggcccagctcagtgatgctgtgggtcagctggctcagctccaaatacagctgctctctgtccagcccagggcctgtggggtcagggcggtgggtgcagatggcatccactccggtggcttccccatctttctctggcctagggagggcagataagggggatgacattaaatagattgcctatggggaggcatcctgagattcctgggggcaggacaggaaggggacagaggaaatgagaatcctggtagacaggtgagaagccatactaagattctctgaatgcaccaacttccaggcagcctgggaatgtgagtagagtcaggaatacaagaattttataaaattgcattctcatggtatggggacaggagagcccagacttgagaaatattaagagctggaattggggatgaaagcaagtggatgggggatgtttatcttgagagaaaccttggaagagaatttaacacctgaaggagagggaggtagggagaagtaagaaattcagaaggatgaccaaagtagaagcctgatctggctgatgggccctgcaaattctctcgattgatgggggaggtggtaggatcagcagatatgttcatcctggagccaccaacgcctgaattccacttgtgctgaggacttccatagggagggaaggaagaaagctgatgaaactccttgggcctgggaacacttggggtagccagactggttattctcagttctcacctgagcaaggtcagcctgcagccagagtacagagggccaacactggtgttcttgaacaagggccttagctgtggaggaggaagagggaggtgagtaagatggctgaggacatagaagtgaggaagatgtaaggtggaaggggctgtaatcagggggcggggctatctctcaggtgaggggaggtgggtgagatcttcttccatgccttggaatgggtgacgtaggtggaacaagacaaggtgggcagggcagagtgaggtgggcagggctctcaccaggccctgaaggaccctctctgtagtgttgaacttcctggagccaggccacatgttctcctcataccgcaggttagtgatggtgaagttgagggtgaatagtatcaggagatggctggcagctgtagtggaggtgggaaataaacactatgttcaaaagtagagaacatttaagagtttgtaatagatttatttctaaacatatgcaaccagatttaaagagagtgataaaatagaaggttttcatgcctcccttgactataacgatcaaagtttttcatagagcatgctaaataataatagttagatgctgagcataacctttggtgatgttctgtgttccataatactagacactatctattacctttgttatcaccaccatcatcatcaccaacactgtgaccatcattttcattattgtcatcaccaccaccatcaggacaaaaaccatgatcttcataatccctatcatctccaccaccatcaccatcatcatccacatcatcacctgcaccatcaccaccaggaacatggtcaccaacaccatcactgtttcatccttaccatcatgacaatcaccaccatcatcctcattatcatcatgatcaccaccatcaccaccacaaccacaaccatgacggtccacatcaccaccactagtaccgtgatcaccaacaccatcatcacatcatccttaaccatcataaccaccaccactatcatcatcatcctcattgtcaatatcaccaccacattgtcaatcaccaccacaaccaccaccatcaccaccaccactgtcatccttcccataatcaccaccaccactatcatcatcatcatcacatcatcattactgtcaaaaccactaccatcatcaatatcatcatcatcatcttcataatcaccatcatcatcacatcatggtcataagcatcaccatcattattgtaatcatctccagcaacatcatcatcaccactatcccacatcatcctcaaaataaaagaagctctctgagggcagagatttttacctcttttgtgttccctgccttatctctagggcctggcagagagtgggtactcaaagaagtttgttgggtgactcatcatcagtaaatttgctatgatttttaatcttatttgagtgaaaaggacagagatgttgacactcatcatgcatactctaatagaggtgccattgactggtacttacctgaagggccaaatatcgaggctggagtcttagatgctcccagatacactgtgggggtcccaggagctgaggagaagcccgcattggttaaagcagcataagctctttcatggcagaaatgccagcagataggaatatttctgcatgtggggcttgagattagtgtctctctggagctgggccagagggaaagggaatcacttgtgccctctcagatctttccctcatgaagaagatataggggcataggagaagggggtcagctcctgtcctgcttggagtaggactggggttactggaacattagtagaatactcactgctggtggtggacacagagctccgatgagtgaaacctgcatagagagggagggaggagagtgggaaagggttaagggaaaggtgggggaccaaaaggggtcagtgctaccatggtgcaattgaaggagtttcagggaacatgggctttgaggattctatacaagtacactcagatcagggaagaaggtcctgaggatgaaggtctccagtacaagatgaagaagaaacggtgaagttcatatcaatcatcaaatacagacaacatggccaagaccagtggccaggcagggagagtgacctcaagacagagagtagaggcctgctcagcaaggaagaagaaactccaaccacatcacaattgctcaccattgacaaagaggctgtcgttgtccagggcataggggcccagctcagtgatattgtgggtcagctggctcagctcccaatacagctgctctctgtccagcctagggcttttggggtcagggtggtgggtgcagatggcatccactccagtggctgtcccatccttttcaggcctggagagggcaggtgaggggaataataataaagttttgtctagggaggagtcccaagattgctgagggaaggacaagaaggggccacaggaaatgagaagcctggtacacagatgagaagccacacttagattctctgagtgcactgactactgtccagcttgggacggtgagcatacttgtggataaaagaatttttctaacatttcagtgtggttcttgcattctcatggcatggggacaggacagcctagacttgagacaggtgacaagctggaattgggaattaaacaagtgaatgaggcacatttgtcttgagagaaatcttagttagagaatttaacacctaagggcaagggaggtggggagaaaagagggaattcagagggatggccagggtggaagtccaatcctgctgatggaccctgtggaaactctcagtcaatttgggtgtgatggcagggggcagtggtaatattgggagacaggttagtcttggagccactgttccttgagttccatctttgatcagaataaccacagagagggcaagaaaaaagaagtccacactcatggagactgggaacaattggggcagacaggttggcaattctaaggtctcacctgagcaaagtcagtctgcagccagagtacagagggccaacactggtgctcttgaacagggacctgagctgtgggagagggagagggaggtgagtaggatggctgagggggtagcgtcaggggactagtcattggggctggcaccagtaggcgggcctggcatcagtggatgggggctcacggctctgggtgtgagaggaggtgggtgagatcttcttccatgccctgtcatgagtgagacaggtggaactagacaaggtgaactgggcagagtgagatgggcggggctcttaccaggccctgaaggaccctctccgtggtgttgaacttcctggagccagggtgctgcatgttctcctcataccgcaggttggtgatggtgaagttgagagtgaatagcaccaggagagggctggcagctgtcgtggaggtgggaaagaaacaacatgttcaaaagtggagaactttatatatttccaaaaggcctacttctaaacatatgcaacaggatttaaagagagaataatataaaaagtttccatgcgtcccttgactataacaacagaagtttctaacaaagcctactaaataatagtagtagttagcatacctcttggtgcatattcagagttctataatactaaatattatctgttacctttattattaccattgtcatcatcaatgtcaccaacactgtgaccctcactattattgtcatcaccaccagcatcagcaccacccacatcagcaccaaaatcatgaccaacagtgtggtagcatccccactaccatcatcatcatcatcaccaccaccacaatcatcatcatttgcatcatgatcaccagcaccatgattaccaacaccattgtcgtatcatcattattctcatcaccacaaccaccatcacaaccatcatcattataatcatcattatcttcattgtaaccatcacaatcactattgtcaatcactaccacaaccgccaccatccttaccaccatcattcttcccataatcacccccacaactgtcctgatcatcatcacatgattaccatcataaccaccaccactaccatcatcatcattattctcattgtcaacatcgtcattactattgtcaatcactaccaagactaccaccatcaccaacaccactatcatccttcccataatcaccaccaccattgtaatcatcatcacagcatcaccatcataacccctgccaccaccatcatcatcatcaccaccaccatcttcataattatcatccttatcaccatcatcatcactagcatcaccattcttattgtcatcatctccagtaacttcaccaccaccaactcccatcaccctcacaataaaataagctttcttgcagcagatatttttaactgttttgtgtccccttccttatccctagagccctgcagaaactaggcactcaattaagtttgctggatgactcctcatccgtagattcactaggattttttatctttatttaagtgaaaatggcagagatgttgacagtcatcaggcatgctctaacagagatgcgattgatttgtacttacccgagggaccaggtttagaaactggagtcccagatgttcccaggtccactgtgggggtcccaggaactgaggagaaggcctcattagtgaaagtgttgaaccctctcatggcagaaatgccagcaggtaggagtatttatggaccttgctgcatgtggggcttgagctgggtctctctctgaagagacttgggccagaagggaaagggagtaacttgtgctgtcccagctcctttgctcatagaggacataggggcatgtgaggaggggtcagttcttgccctgcatgatgtaggatcaggagcactggaaatcagtggatactcactgctagtggtgggcacagagctccgctgtgtgaaacctgcatagagagggagggaagagggtgggtaagggttaagggagtggtggggaactatataggggtcagggtaccctggtgcaatggaaggaatttcccagaacacgaaccattgaagattctctatcagcaccctcagatccagaaagcagatcctgaggatgaactcagtccaagatgaaatagaaaccatgaagttccaacctcagccatcacatacagacaacatggatgagcattcaatagccaggcagggagcgtgacctcaaggcagagagtagaggctgcccagcaaggaggaagagactccaaccacatcacaactactcaccattgacatagagactgtccctgtccagggtgtaggggcccagctcagtgatgctgtgggtcagctggctcagctcccagtatagctgctctctgtccagtccagggcttttgggatcagggcggtaggtgcagatggcatccactttggtggctgccccatccttcttgggcctggggagggcaagattggggaaagacaatacacggattgcctagggaggggttctgagatcccacagggcaggacaggagggggccagaggaaatgagaagcctggtagagaagtgagaagccatacttccattctctgagtgcactgactcttagcaactatgagcagaatcatggatgcaaggatttttataaaattgcaaagtggaaactgcattcttgtagcatggggtaaggagaactcatacttgagacaggtgaagagctaggtttggggatgaaagcaagtggacgaggcatgtttttcttgggagaaatcctgggaacagaattgaaccacttgtggaaaggcaggtaggggaaaggagggaattcagagggatgaccaaggtagaagctcagtcctgctgatgggctctgcatctctcagttgaggtgggaggtggtgggaacaggaagcacattggtcttagagccactgcctcctggattccacctggctgcggacatctccagggagtgcagaagggaagcaggtcaaactgctcagatcagtcagactggctgttctcagttctcacctgagcaaggtcagtctgcagccagagtacagagggccaacactggtgttcttgaacacaggcctgagctgtggaggagggagagggaggtgagtgggaggactgaagtcataggggtgtggtagaagggaggtgggcagggctggcaacagttggtggggctggcatcagtggttggggtatgcatatctgggggcaagatgaggtagatgagatcttccatgctctgcaataggtgaggtgggcaggactaaacatggtgagtggggtagaatgaggtatgtggggctcttaccagaccctgaaggactctctccgtggtgttaaactttctagagccagggtgatgcatgttctcctcataccgcaggttagtgatggtgaagttaattgtgaatagcaccaggagagggctggcggctatagtgaagatgggaaataaacagtgttcaaaagtagactaacacttaagaatttgtgatagaattgtttctaaacatatgcaacatgatttaaagtgacaaaataaaaggttttcacgcctcccttcactgtaatggtacatagttctcatagagcatactaaataatagtagttagatgctaagcacagctcttggtgcatattcagtattccatactactagacattatctactacctttgccaacaccacgatcatcatcaacatcagcaacactgtgaccatcgctatcattattgtcatcaccaccagcatcagcaccaaaaccatgaccatcataatccctatgatccccacccatcatcatcattacaccaccagcaccacaaccatcatcatccatataatcaccactagcacatggtcactaacaccattatcatatcattcttactatcataaccaccatcaccaccaacatcattatcatcatcaccaccatcattatcctcattgtcaacatcatgatcacattgtcaattgccatcagaaccatcacatcaccaccaccactatcatccttcccataatcatcaccaccactatcatcatcatcaccatcaaaaccactaccaccatcatcatcatcatcaccatcatcagcaacaccatcattgttgtcatcatgtccatcatccctatcattatcatcatcatcacaacaatataaccttcctgaggatagagatttttatttcttttgtgttccctgccttatccctagggccccgaagaagccagacgctcaacaaaatttgtcggttgacttgtcatcactagattcactaggacttttcatttttatttgagtgaaaatggtggagttgtaggccaggtgcggtggctcacgcctgtaatcccagcactttggggggccaaggcagacagatcacgaggtcaggagttcgagatcagtttgaccaatatggtgaagctccacctctactaaaaatataaaaattagctgggcatggtggcatgcacctgtaatcccagctactcaggaggtggaggcaggagaatcgcttgaacctaggaggcagaggttgcagtgggctgagatcacgccattgcattctagcctgggtgacagagcaagactatgtctcaaaaaagaaaaaaaagaaagaaaagaaaatggcagagatgttgacactcctcaggcatgctgtaatagagatgacactgaatagtactcactcatgggtccagacagggaggctggagttctcgaggttgccaggtgcattgtggaggtatcaggagctgaggagaaggtttgctgtattagtgaaagcagcaaaccctctcatggcagaaacaccagcaggtaggagtatttatggcccttgctgcatgtggggcagtatctccatctggagctgggccagagggaaaggggaataacttgtgctctctcttccttccctcatgaagaggatataggggcatagaaggagaggtaagctcctgccctttatgatgtaggatcaggagcactggaacatcagttaatactcacttctggtggtcgtcatagagctctgatgggtgaaacctgcattgagatggagggacgagagtgggtaagtgttaagggagtggtggggtaccctggtgcaacagaaggaatttcccagaacacgggccattgaagattctctatcagcaccctcagatttagaaagcagatcctgagggtaaattcagtttgagatgaagaagaaaccacgaagttttgaccttagccaccacatacagacaacatggttgagccttcaatagccagacgggaagtgtgacctcaggccagagaatagaggctgtccagcaaggaggaagagactccaaccacatcaaagttgctcaccattgacatagagactgtgcctgtccagggtgtaggggcccagctcagtgatgccgtgggtcagctggctcagcttccagtacagccgctctctgtccagtccagggcttttggggtcaggacgatgggtgcagacagcatccactctggtggctgccccatccttctcaggcctagggagggcagatgaagcaaataacaatttaaaaattgcctcaggaggagttctgagatttcctggggccagacaggaaggggccagaggaaatgagaagcctgggaaagaggtaataagtcacatttagattctctgagtgtcccggctgccagccagcccaggactgtgaacagagtcatagatgcaagaactttttataaaattgcaaagtaaagcctgcattctcatggcatggagacaagagtactcagacatgagacagatgaagagctggaattggggatgaaagcaagtggatgaggcatgcttgtcttgtgagaaatcctggggacagaatttaacaactggaggaaagggaggtgggtggaaaggagggaattcagagggatgaccaaggtagaagcacaattctcctcatggactctgcagaatctcgcagttgattggggtggtgctgatggtatcaggagacagattagttttgaagccaatgcttcccgaattccatctgttgtgaggacattcacagggatggcaggaaaaaaaaaaacaatccaaactctttgcgactaggaacaattggggcagctaggctagctcttctaaagtctcacctgagcaaggtcagtctgcaaccagagtacagagagctgacactggtgttcttgaacaagggcataagctgtggaagagggagagggaggtgactaggagggctggggatatagtggtggggcacaagtgtggcgagtgcagctggcaccagtgggcagggcttgtgtctctaggggagatggatgagattttcttccatggccctggcatgggtgatgttgttgggaccaggtaacgtgggaggggcagagtaagttggacaggggtctcaccagaccctgaaggaccctctccgtggtgttgaacttcctggagccagggcgacgcatgtcctcctcatactgcaggttagtgatggtaaaattgagggtgaatggcagcaggacagggccagtggctgtagtaaaaggtgtggaaacaaacactattgtgtttgtttgtatttttaatctgttgcatatagttaaaaataagtctattgcaaactcctcaagtttctcgacttttgcaatagacttgaagagtttgcaataagtttatttttaatcatatgcaacagaatttaaaatgaatgacaaaattaaaggtttccatgcccttcttgatagaaattatttttttaaaaagcatattacataatatttgttagattctgagcccagcttttggtgcatattcagtgctgaaaaatatcagatattacctgttacctttgtcatcaccattatcatcatcatcatcatcatcatcaccattattgtcagcatcagcaccaagaccatcaccacaacgataatccccatcaatactaccacaaacatcattatcaccatagtcatatcatcattaccatcataatcatcatcactgtcattatctgaataatcatcatcacgatcattgtcatcataatcactatcgccatcactattgtcatcctcaccatcacgaatgtcacaatccacatcaacaccaccacaaacatcatcatcatcaccataatcacatcatcattagcatcataaccagcaacattactgtcatcatccaaacaaccatcatcatctttaccatcattgtcaccattgttatcatcaccactccaacatcatcaccacaatcaacacaaccgtcatcatcatcattattattatcattattgtcaaaatccccataattattgtcaattgtaatccccaccaccaccatcattcttcccatgattaccaccagcataatcatcattatccttaccatcaccaccaccaccaccaccactgcaatcatcatcaccgccacccccatcatcatcatcatcacaataatataagctcactgagggcagtgttttttctttttttgttccctgatgtatatccaggtcctgatacagaggcagtgctcaatgaactgggttggttgacctatggttactacatttactatgaatttccatctttagttgagtgaataatgacagagatgtttacactcatcaaccatgctctaacagagtataaacagagatgtttacactcatcaaccatgctccaaataccattgactggtatttacctgtggggccagggagggatgatggagtctcagaggtttccggctgtactgtgaaagtcccaggagctgaggagaagccctcaacagtgaaaggagcaagtgctctcatggaagtaatgccagcaggagggactattcatggggatttttgcctgtggggcttcagctgggattctgattagctggggcagtggggaaggggaataatttgtgtcctctatgttccttcccttatggaaaggacataagggcttatgaataggggtcagctcctgctaagtttgttgtaagattggggccatgggaacatcagtagaatactcactgctggtggtgggcacagagctccgctgggtgaaacctgcatagagagggagggaggagtgtggataagagtcaagggggaggtagggggtcaaaaaaaagtcagggctaccctggtggaatgaaaggagtttcatggaacaggggcctttggagattctctgtcagaatctgagtatcagggaagaagctactaaggatgaaatcagttcaagataaagaagaaatcatgaaattctgacatcaatcaccacatacagacgtgtcctagccttcagtgtccaagcagggcatgtgacctcaagtaagagagtagaggctgcccaggcaggagaaagagactctaatcacatcagagctgcttaccattgacatagagactgtccctatccagggtgtagggtcccagctcagtgatgctgtgggtcagctggctcagctcccagtatagctgctgtctgtctagcccagggattttggggtcagggcggtgggtgcagatggcgtccactctggtggctactccatccttctcaggcctggggagaggtggtgaggggaatggcaataaatgaattgcctaaggagaggtcttgagatggcagagtgtaggacaagaaggacagaggaagtaaaaagtctaatacagaggtgggaagcaatacttagattccctgagtgtactggactgcttgggactgtgagcatagttgtggatataacagttttcccaaaatggcagggtggatcctgcattcttaaagcatggaaacaggagagctcagacttgagatagctgaagagctggaattggggatgaaaacaagtggttgaggcatgtttgtcttgagagaaatcctggttacagagtttaacacctaaagtcaagggaggtggggggaaaacagggaattctgaggaatggccagggcagaagtccagtcctgttgatggactctggaatctctcagtcagtttggaagtgggggcgggggcactgctaataccaggagacaggttagtcctggagccagtttcctggattccatctttgataagaataatcacaaagaggacaggaaaaaagaagtccaaactcattgagactaggaataatcggggcagccacactggaaattctaaggtctcacctgagcaaggtcagtctgcagccagaatacagagggccaacactggtgctcttgaacaagggcttgagctgttggggagggagagggaggtgagtggcagggctgaagaagtagaggcacggcagaagtgaggtgggtggggctggctgtagttggtggagctgacatcagtaggttgtatggggcttttatctcttggggtgaggggaggtgggtgagatcttccatggccatataggtgacataggtgggactaggtaaggtggatagggcagagtgagataggtggggctcttaccagaccctgcagaacactctccgtgatgttgaacttcctggagccagggtgacccatgttctcctcatactgtaggttagtgatggtgaagttgagtgtgaatggcaccaggagagggccggtggctatagtgaaggtgggaaataaacactatgttcaaaagtagagaaaatttaagagtttgcaatagacttatttctaaacatatgcaacaggatttaaagtgagtgataaaacataatgttttcatgcctcctttgactattatgatagctgttcttgagagagcacattaaatagtagttagaggctgagcataggtcttggtgcatattcagtgttccatagtgccagatactatctagtgccgttgttaacaccaccttcattttcaacatcaccatgattgtctccatgagtattattatcatcaccaccatcagcaccaaccccaacaccaccaccaccatcatcattatcaccattaacaccacaaccatcatcatcccaatcatcacctccatcaccattatcatcatcaccatcatcactgtcaatatcaccatgattgccaccatcagtagtattattgtcatcatcaccaccaccatcatcatcatcatcatcacataaacagaagctcactgagggcagagatgtttttactggttttattttccttgctgtatccctagggtctggtacactgtaggtggccaattaatttttttggttcactcactatcactagacttattatgattttctatctttatttgaatgaaaatggcacagacgtttacatcaggcatgctctaacagagatgccattgactggtacttacttgtggggctggggacgggggatggagtccctgaggttccaaggtcaactgtggaagtccaaggagctgagaaaaagtcctcatcagtgaaagcaggaagcactctcatgacagaaatggcaagaggggagactatggggtccgctgcctgtgtggctagagatgggtcagtctttggagctggggcagagcagagcttgagtaactgctgccctcttatctcctttgctgaagaagaggacctatgggtttatgaggaggagtagctcctgttccgcttggtgtagaatcaggggcatgtggacatgagttgaatactcactgctggtggtgagcccagagctccgatgggtgaaacctgcatagggaaggaggcaggagagtgcgtaagggttaaggagacattggcaaccaaataggggtcaaggctaccctggtgcaaaggaatgaatttcatggtacggggcatttgaagatttcctatcagcatcctcatatcagcaaagaatgccctgagggaacacaatctacggtgataaagaaactatgaagtccagaacttagtcatcccatgtaaaacaagtgacagaattttcaattgccaggcaggaagtgtgacctctagttagagattagctgctgctcagcaaggaggaagagacttcaaccacatcacagccactcaccattgacgtagagactgttccggtccagggtgtaggggcccagctctttgatgccattggtcatctggctcagctgccagtacagctgctccctgtccagtccagggctttgagggttaaggtggtgggtgcagatggcatccactccagtggctgccccatccttctcagacctggggaaggtaggtggggagaatgacaatgaaaagattacctaggatgggtcttgagattgctgagagaaggacggcaaggaaccagaggatatgagaaacctgggaaagaggtgagaagccacacttagattctctgagtgcgcagactactggcttgttagagactgtgagcagagtcatgaatacaacagttttgataaaagtgcaaggtgaggctgggtatggtgtctcacgcctgtaatcccagcactttgggaggccgaggcaggtggatcacctgaggtcaggagttcaagaccagcctgaccaacatggagaaaccctgtctctactaaaaatacaaaattagccgggtgtggtggcccatgcctgtaatcccggctactcgggaggctgaggcaggagaatcgcttgaacctgggaggcagaggttgcagtgagccgagattgtgcgattgcactccagcctgggcaacaagagtgaaactctgtctcaaaaaaaaaaaaaagtgcaaagtgaattctgcattctcatggcatggggacaggagagcccagacttgaggccagtgaagagctggaaatgaggatgaaagcacgtggctgaggcatgattgtcttgagagaaatcctggggacagaatttaacacctaaatgaaagggaggggcagggaaaggagggaattcagagtgatgaccagggtaggggctcaattctgatgatggacaatgcagattctctctgttgaggtggagtgtgggggtgttactatcaggagacacactggtcctgaagccagtgactgctgaaacccacctttggtgaggatatctctaggaagtgcagcaaggaagcagtgcaaagccttttggagtgagaataattgggacagctaggctggctattctagcctcacctgagagagatcagtctgcagccagagtacagagggccgacactggagttcttgaacaagggaccaagctgtggaaaagggacagagagatgagtaggagggctaaggtccctgtgtgtgggtgcagaaataaggtgagtgaggcagggcctagtgggtgaggctagcttcagtgggcgtggctggcctcagtgggtgagtcttgcatctctgggggcaaggacgaagtgggtacattcttctcccattaccctggcttggatgttgtaggagggactgagtatcttggtcagggcagagtgaggagggcagggcactaaccagaccctgcaggaccctctctgtggtgttgaacttcctggagccagggtgacgcatgtcctccccatactgcagattggtgatggtaaagttgagggtgaacggcaccaggagaggaacagctgctgtagtgggagggggaaataaacactatgttcaaaggagagaaaataggagtttgcaatatagttatctttaaatataggcagtatttaattgactgacaaaataaatatttaccatgcatcccttgccttcaatgacagaatttattttttaaaggatattatataaaatagtagttagatgctgagcatagctcttggttcatattcagtgctcaatattctctgatgttacctgttatctttattattgccatcatcatcattgctatcattgtcacaatcacaatctttattatcaccaccatcataataatccccaccatgaccaccacaagcatcatcatcaccacactcaacacatcactattatcatcataaccccatgaccatctctggcatcatcctcaccaccatcaccagttattgtcatcaacatcaccagtttcatcatcatcatcataaatagcaccaccaccaccaccatcatcatcactaacatcataaccgtcactgacatcatcttcatatccatcatcatcatggtcggcaacatcaacaccattatcatcaacagcatcactatcatcatcatcatcatcatcatcaacagcaccaccaccatcatcaacagcattaccatcatgatcattaccatgatcatgatcatcatcatcatcaacaactagcaccaccaccactatcatcatcacatgaataaaaaagctcactgagggcagagacatttttattggttttgttttccttgctgtatcccttgggtctggtacacagtaggtggccaacaaatatttttggttcactcactattaccagatttactataattttacatctttatttgagtgaaaatggcagagatgttcacactcatcaggcatgctgtaatagagatgtcattgactggtacttacttgtggggctggggagggaggatggagtccctgaggtcccaaggtccactgtggaggtcccaggagctgaggaaaagtcctcatcagtgaaagcagaagcactctcatggcagaaatggccaaacaggggactattatgaggtctgctgcatgtgggcatgagctgggcctgtctttggagctggggtggaagggagcttcaataacttcagccttcccagctcctttgctcatgaggaggacttatgggtttatgaggaggggcagcttctgctgtgcttggtgtaggatcaggggcatgtggacttgagttgaatactcactgctggtgggggccacagagctccgatgggtgaaacctgcatagagaaggagggagaaaattgtgtaaggattaaggagatgtgggggatgcaataggggtcatggctatcctggtgccatgggacagggaccattaaaagtttcctatcggcatcctcacaacagagaagaatgccctgagggaatgcagttcacgatgacgaagaaaccatgaagtccagaacttagtcatcccatgtagagcacataacagaattttcaatggccaggcagagagtatgcccccaagccagagattagagtctgctcagcagggaggaagagactccaaccacatcacatctgttcaccattgacatagagactgttcctgtccagggtgtaggggcccagctctttgatgccatgggtcagctggctcagctcccagtacagctgctctctgttgagtccagggcttttggggtcaagacggtggctgcagatggcatccattccagtggctgccccattcttctcaggcctggggaaggaaggtgggaggaatgcaatcaaaagattaactaggaagggttttgagattgctgagggaaggactgcaaggaaccagaggaaatgagaagtctgggaaagaggtgagaaatcacacttagattctctgaatgcaccgactactggcttgctttgaactgcaagcagggtaatgaatacaagaatttttatgaaagtgcaaagtggcttggcacagtgcctcatgtctgtaatcccagcactttgggaggccaaggcgggcagatcacttgaggtcaggagttcaagactagcctggtcaacatggtgaaacccagtctctacaaaaaatacaaaaatttgctgagtatagtggtgggtgcctgtaatcccagctacttgggaggctgaggcaggagaatcacttgaacatggaaggcggaggttgcactgagctgagaccagcctggtgtgcagtaagactatgtttcaacaatgaaataataaaataaaataaaataaaataaaataaaataaaataaaataaaataaaataaaataaaataaaataaaaaagtgcaagttaaaacctgcattctcatggcatggggacagagacaccagacgtgagaccaatgaagagctggaaatgggcatgaaagcctgtggatgaggcacgatcatcttgagagaaatcctggggacagaatttaagacctaaaggaaagggaggtgcagggacaggagggaattcagagggatgatcagggtagaggctcaatcctgatgatgggccattcagattctccctgttgaggtggggtttgggggtgttactatcagaaaacacattggtcatgaagccagtgactcctgaattccacctttggtgaggatatccctaggaagtgcagcaaggaagcagtgcaaagtcgattggagtgagaacaagtggggcagccaagcttgatcttctaaggtctcacctgagcaaggtcagtctgcagccagagtacagaaggccgacactggtgttcttgaacatgggaccaagctgtggaggagggagaaggagatgagtaggagggctaagttgcgtgtgtgggtgtgtagggcagaagtcaggtgggcagaacaggcatcagtgagtggggctggtttcaatgggcatggcttgcatctcttggggcaagggtgaggtgggtatgatcttgttccatcacctggcatggatgatgtaggaggtactgactctctggggtggggcggagtgaggagggtggagcactaaccagaccctgcaggacccgctccgtggtgttgaacttcctggagcctgggtgatgcatgtcctcctcgtactgcaggttggtgatggtgaagttgagggtgaatggcaccaggagagggccagcagctgtagtggaggtgggaaacaaacactatgtccaaagtagagaaaataggagtttgcaatagacttatctttaaacatatgcagaatttaaattgagtgacaaaatatttaccatgcttcccttgcctaaaacaatacaatttatttttacaaaaatatattatataatagtatttagatgctgagcactcctcgtggtgcatattcagagctcaatattgtctgatgttatgtactatctttattgccatcatcatccttgctatcattgtcaccatcaccatcattattatgaccatcactgccatagtaatgcccatcacgaccaccacgaacattatcatcaccacattcaacacatcatcatcatcataaccccacaccatcactggcattatcctcatcaccatcattgtcattgtcatcaacataaccacgaccaacatcaatatcatcggtaccacggtcagcatcctaaacagcatcaccacagtcatcatcatcatcacacttaacacatcatcattatcatcataatcttcacgaccatcacggacaatatcctcaagtccatcaccatcatcatcagtaatatcaccaccgccatcatcaacagcatcaccatcatcaacagcatcaccatcatcaacagcatcaccatcatcaacagcatcccactcaacatgtcattattactatcataaccaccatcactatcatcgtcacatgaacacaagctcactgagggcagagatgtttttattggttttattttccttgctgtatccctagggtctggtacaatgtaggtggccaatacatttttttggttcactcagtatcactagatttactatgattttccatcttcatttgagtgaaaacggcacagatgttcatattcatcaggcatgatctaatagacatgtcattgactggtacttacatgtagggctggggagggaggatggagtccctgaggtcccaaggtccactgtggaggtcccaggagctgaaaagagtcctcatcagtgaaagcagaaagcactctcatggcagaaatggaaagagggtagactattataaggtctgctgcatgtgggcttgagctaggactgtctttggagtaggggcagaggggagcttgagtaacttctgccttcctagctcctttgctcaagaggagttcttatgggcttaagaggaggggccagctcctgctccacttaatataggatcaggggcatgtggacatgagttgaatactcactgctggtgttgggcgcagaggtctgatgggtgaaacctgcgtagagaaggagggaggagactgggtaagggttaaggagatgtgggagatgcaatagggttcagggctaccctggtgcaattaaatgagtttcatgggatggggccattaagatttcctatcagcattctcccaaaagggaagagtgccccaagggaatgcagttcatgatgatgaagaaaccatgaagtccagaacttagtcaccccatgtagagcacatgacaaaattttcaatggccaggcagggagtgtgcccccaagccagagattagaggctgcccagcaaggaggaagagattcctaccatattgcagctcctcaccattgacatagagactgtttctgtccagggtgtagggacccagctctttgatgccattggtcagctggctcagctcccagtatagctgctccctgtccactccagggcttttggggtcaagacggtgggtgcagatggcatccactccagtggctgctccatccttctcggacctgaggaaggtaggagggggaatgacaatgaaaagattgcctaggacttgtcttgagattgctgagggaaacatatcaaggaaccagaggaaatgagaaatctgggaaagaggtgagaatctgcacttagattatctgagtacatagaccactatcttggttgggactgcaagcagagtcatggatataataatttttataaaagtgcaaggtgaaacctgcattctcatggcatggggacaggagaacccagacttcagactagtgaagagcttgaaagggggatggatgtatgtggatgaggtatgattgtcttaagagcagtcctggggacagaatttaacactaaatgaaagggaggggcaggcaaaggagggaatacagaggagtgatcagggtagtgcctcaatcctgatgatggatcacgaaaattctgcctgttgaggtggggaatggtggtgttactatcaggaaacaactggttctcaagccagtgactcctgaattccctttttggtgatgatatccctaggaagtgcagcaaggagacagtgcaaagtcttttaaagtgagaacaattgtggcagccaagctggctcttctaaagtctcacctgagcaaggtcagtctgcagccagagtacagagggccaacactggtgttcttgaacatgggaccaagctgtggaggagggagagagaggtgagtaggagggctaaggagtgtgtgtgttaggggcagatgtgaggtgggaggagtaggcaccaatgagcagggctggtctctgtgggcgggacttccatctctcaggggcaggggtgaggttggtgctatcttctttcatcaccttggcatctatgatgtagaagggactggatatctggggctggcagagtgaggagggaagggcactaaccagactctgcaggactctctctgtggtgttgaacttcctggagccagggcaatgcatgtcctcctcgtacttcaggttggtgatggtgaagttgagggtgaacggcaccaggagagggccagcagctgtagtgggaattgaaaataaacactatgttcaaagtagagaaaataggggtttggaatagacttatctttaaacatatacaaaatttaaattgagagaaaaatatttatgtctcccttgcctataataatacaatttatttttataaaaatatattatataatagtagttagatgctgagcatagctagttgtgcatattcagtgctcaatattgtctgatgttatctgttatctttattatggccataatcattgttgctatcattgtcaccatcaccatcattattatcatcatcaccatgataatccccatcatgatcaccacaaacataatcatcaccacactcaacacatcatcattatcataataaccacatgaccatcactggcatcatcctcatcaccattattgttattgtcatcaacgtcaccactaccatcatcaacaccatcagtaccatggtcaccatcatcaacagcaccaccaccatcatcatcatcatcacactcaacacatcattaccatcataaccttcacaaccatcactgacaacatcctcatgtccgtcatcatcattgtcagtaacatcaccaccaccatcatcaacagcaacaccataatcataaattatcatcaaactgaatatgtcattattactattaccaccaccaccaccatcatatcatcacatgaacacaagctcactgagggcagagatgtttttattggttctattttccttgctatatccctagggtctggtacactgtaggtggccaatacattttttttggttcactcagtatcactagatttattatgattttccattttcatttgactgaaaatggcacagatgtttgcattcatcaggcatgatctaatacagataccattggctggtacttacttgtggggctggggagggaggatggagtccctgacccaaggtccactgtggaggtcccaggagctgaaaaaagtcctcatcagtgaaagcagaaagcactctcatggcagaaatggcaagaagatagactattatgaggtctgctgcatgtgggcttgagctgggtctgtctttggagctggggcagaggggagcttgagtaacttctgccttcccagctcatttgctcaagaggaggacttatgggttaaagaggaggggccagctcttgctccacttgatgtaggatcaggggcatctggacatgagttgaatactcactgctgctggtgggcacagggatccaatgggtgaaacctgcatagagaaggagggaggagactgggtaagggttaaggagatgtgggggacgcgatagagttcaggactaccctggtgcaattaaatgagtttcatgggacaggggtcattaaagatttcctatcagcatcctcacaacagggaagagtgcccagagggaatgcctctcatgataacaaagaaaccatgaagtccagaacttagtcatcccatgtagagcacgtgacagaattttcaatggccaggcagggagtgtgcccccaagccagagattagaggttgcacagccaggaggaagagacccctaccatatcacagctgctcaccattgacatagagactgttcctgtccagggtgtaggggcccagctctttgatgccattggtcagctggctcagctcccagtatagctgctccctgtccactccagggcttttggggtcaagacggtgggtgcagatggcatccactccagtggctgctccatccttctcggacctgaggaaggtaggagggggaatgacaatgaaaagattgcctaggacttgtcttgagattgctgagggaaacatatcaaggaaccagaggaaatgagaaatctgggaaagaggtgagaatctgcacttagattatctgagtacatagaccactatcttggttgggactgcaagcagagtcatggatataataatttttataaaagtgcaaggtgaaacctgcattctcatggcatgggaacaggagaacccagacttcagactagtgatgagcttgaaaggcggatgcatgtatgtggatgaggcatggttatcttgagagaaatcctggggacagaatttaacacctaaatgaaagggaggggcagggaaaggagggaattcagatgggtaatcagggtagtgtctcaatcctgatgatgaaccatgaagattttgcatgttgagttggggcatgggggtgttactatcaggaaacaactggttctcaagccaatgactcctgaattccccttttggtgaagatatacctaggaagtgcagcaaggaagcagtgcaaagtcttttagagtgggaacaagttgggcacccaggctggctcttctaaagtctcacctgagcaaggtcagtctgcagccagagtacagaaggccaacactggtgttcttgaacataggaccaagctgtagaggagggagagggaggtgagtagtggggctaaggtgtgtgtgtgtcggggcagatgtgaggtgggtggagcaggcaccaataagcaggactggtctctgtgggtggggcttgcatctcttggggggaaggggggaagttgttgctatcttctttcatcaccctggcatggatgatgtagaagggactggatatctggggctgggcagagtgaggagggaagggcactaaccagagtctgcaggaccctctcagtggtgttgaacttcctggagccagggcgatgcatgtcctcctcatacttcaggttggtgatggtgaagttgagggtgaacagcaccaggagagggccagcagctgtagtgggaattgaaaataaacactatgttcaaagtcaagaaataggggtttagaatagacttatctttaaacatgtgcaaaatttaaattgagaaacaaaatatttaccatgtctcccttgcctataataatacaatttatttttatgaaagtatgttatataatagtagttagatgctgagcatagctaatcatgcatattcagtgctcaatattgtctgatgttatctgttatatttatgatgactggccatcatgattgttgctatcactttcaccatcataaacagcaacatcatcatcatcatcacactccacacaccatcattaccatcataaccttcacagccatcactgacaacatccttatgtccatcatcatcattgccagtaacatcaccaccatcatcatcaacagcatcaccatcatcatcaatcatcatcacactcaacatgtcattattactatcataaccaccaccaccatcatcacatgaacacaagctcactgagggcagaggtgcttttattagttttcttttccttgtatctctaaggtctggtacactgtaagtggccaataaatttttttggttcactcagtatcactagatttactatgattttctattttcatttgagtgaaaatggcacagatgttcacactcatcaggcataatctaagggagatgccattgactagtacttacttgcggggcttgggagggagaatggagtccctgaggttccaaggtccactgtggaggtcccaggagctgagaaaaagtgctcatcagtgaaagcagaaaataatctcatggcagaaatggcaagaaggtagactattatgaggtctgctgcatatgggcatgagctgggcctgtctttggagctagggtggaagggagcttcaataacttctgccttcccagctcctttgctcaagaggaggacttatgggtttaagaggaggggccagctcctgctccacttaatgtaggatcaggggcatgtggacatgagttgaatactcactgctgctggtgggcacagaggtccgatgggtgaaacctgcatagagaaggagggaggagacttggtaagcgttaaggagatatgagggacacaataagggtcatggcaatcccaatgcaattaaatgagtttcatgggacaatgagtttcatgggactggggccattaaagaattcctatcagtatcctcacaacagggaagagtgccctgagggaacacagttcacgacaatgaagaaactgtgaagtccagaactttgtcatcccatctacaccacatgacagaatattcaatggccaggcagggagtgtgacttcaagccacagattagattctttccagactctagaaggaaaagactccaaccacatcacagctgctcaccattgacatagagactgttcctgtccagggtgtaggggcccagctctttgatgccattggtcagttggctcagctcccagtacagccgctctctgttgagtccagggcttttggggtcaagatgatggatgcagatggcatccactccagtggctgctccatccttctcagacctggggaaggtaggtggggagaatgactatgaaaagattacttaggttgtgtcctgagactgctgatggaaagacagtaaagaaccagaggaaatgagaaacctgggaaagaggtgagaagctacacttagattctctgagtgcatggactactggcttgcttgggactgtgcacagagtcacagatacaaccatgcttataaaagtgcaaggtgaaacctgcattctcatagcatggggacaggagagcccagacttgagaccagtgaagagctagaaacagggatgaaagcacttggatgaggcatgattgtcttgagagaaattctggggacagaatttaacacctaaatgaaagggaggggcagggaattccgagggatgatcaggatagaggctcaatcctgatgatggaccatgcagattctccctgttgaggtgaggtgtgggagtgttactatcaggaaacacattggtccagaagccagtgactcctgaattcccctttgggtgaggatatccctaggaggtgcagcaaggaagcagagcaaaatctactggagtgggaacaactggggcagccaggctggatcttctaaggtctcacctgagagaggtcagtctgcagccagagtacagagggccaacactggtgttcttgaatatgggaccaagctgtggaggagcgagaggaaagtgagtaggagggctaaggtgcatgtgtgtggggcagaagtcaggtgggtggagcaggcaccagtgggcatggctggcctcagtgagcagggcttgcatcttttgtgggcaagggtgagatggatacaatcttcttccatagccctggcatagatgatgtatctgggatggggcaggagtaaagtgggtggggctctcaccagaccctgcaggaccctctctgtggtgttgaacttcctggagccagggtgacccatgtcctccccatactgcaggttggtgatggtgaagttgagggtgaatggtaccaggagagggccagcagccataactggaatgggaaataaacactatgttcaaagcagagaaaataggagtttgcaatagacttatctttcaatatatgcagaatttaaattgagtgacaaaatattttccatgcctcccttgcctataataatataatttatttttgtaaaagtatattatataatagtagatgctgagcatagctgttggtgaatatttattgctcaatactgtctgacattttctgttaactttattatcatcatcatcaccatcaccatcattgtcacgtcaccatcattattatcatcatcaccaccatgataatccccatcatgaccaccacaaacatcatcactctcaacacatcatcattaccatcataaccccaccaccatcacttgaatcatccttatcaccatcatcatcattgtcatcgacatcaccaccaccatcaacatcaacatcaacactatcattatcatgatcattataaacagcaacactaccaccatcatcatcaccatcacactcaatacgacatcattaccatcacaacctccaccaccatcacctgcatcatcctcatcaccatcatcattgtcatcatcaccaccaccatcatcaagatcaccactatcatcattataaacagcaacactatcactattatcatcacactcaatacatcataattaccatcataacctcctctaacatcaccagcatcatcctcatcaccatcaccatcatcatcaacatcactactgccatcatcaacagtatgaccatcatcatcatcatcatcataaacaatgtcaccaccaccatcatcatcatcccactcaacacatcatcattaccattgtaactaccaccaccatcatcatcatcacaagaatacaagctcactgagggcacagattttttttaaattgattttctttttcttactgtattcctggggtctggtacacagtaggtggccaaaacaaatttgtcacaagcattcttatacaccaataatagacaaacacagagccaaatcataagtgaactcccattcataattgcttcaaagagaataaaatacctaggaatgcaacttacaagggacgtgaaggacctcttcaaggagaactacaaaccactgctcaatgaaataaaagaggatacaaacaaatggaaaaacattccatgctcatgggtaggaagaatcaatatcgggaaaatggccatactgcccagggtaatttatagattcaatgccatccccatcaagataccgatgactttcttcacaaaattggaaaaaactactttaaagttcacatggaaccaaaaaagagcccgcatcgccaagtcaatcctaagccaaaagaacaaagctggaggcatcatgctacctgacttcaaactatactacaaggctacagcaaccaaaacagcatggtactggtaccaaaacagagatatagatcaatggaacagaacagagccctcagaaataacgccacatatctacaactatctgatctttgacaaatctgagcaatggggaaaggattccctatttaataaatggtgctgggaaaactggctagccatatgtagaaagctgaaactggatcccttccttacaccttatacaaaaattaattcaagatggattaaagacttaaacgttagacctaaaaccataaaaaccctagaagaaaacctaggcattaccatttaggacataggcatgagcaaggacttcatgtctaaaacaccaaaaacaatggcaacaaaagccaaaattgacaaatgggatctaattaaactaaagagcttctgcacagcaaaagaaactaccattggagtgaacaggcaacctataaaatgggagaaaattttcacaacctactcatctgacaaagggctaatatccagaatctacaatgaactcaaacacatttacaaggaaaaagcaaacaaccccaacaaaaagtgggagaaggacatgaacagacacttctcaaaagaagacatttatgcagccaaaaaacacatgaaaaaatgctcaccatcactggctatcagagaaatgcaaatcaaaaccacaatgagataccatctcacaccagttagaatggcaatcattaaaaagtcaggaaacaacaggtgctggagaggatgtggagaaataggaacacttttacactgttggtgggactgtaaactagttcaaccattgtggaagtcagtgtggcgattcctcagggatctagaactagaaataccatttgacccagccatcccattactgggtatatacccaaaggattataaatcatgccgctataaagacacatgcacacgtatgtttattgtggcactattcacaatagcaaagacttggaaccaacccaaatgtccaacaatgatagactggattaagaaaatgtggcacatacacaccatggaatactatgcagccataaaaaatgatgagttcatgtctctgtagggacatggatgaaattggaaatcatcattctcagtaaactatcgcaaggacaaaaaaccaaataccgcatgttctcactcataggtgggaattgaacaatgagaacatgtggacacaggaaggggaacatcacactctggggactgttgcagggtggggggaggggggagggatagcattaggacatatacttaatgctaaatgacgagcaaatgggtgcagcacaccagcatggcacatgtatacatgtgtaactaaactgcacattgtgcacatgtaccctaaaacttaaagtataataaaaaaagtgaaaaggatgagaaaaaacaaacaaacaaatttgtccactcagtatcactagatttactatgattttccatctttatttgagtgaaaatgacagagatgtttacactaatcaggtatgctctcatagagatgtcattgactgatacttacttgtggggctggagagggaggatggagtccctgaggttctgagatccactgtggaggtcccaggagctgaggaaaagttctcatcagtgaaagcataaagcactctcttggcagaaatggcaagaggggagactatttatggggtttgttgcatgtgtagcttgagctgggtcggtctcttgagctgggcagagggacacttaaataacttctgccctcctaaatcctttgcttatgaagaggacttaatgggtttatgaggaggggccagctcctgctcctcttggtgtaggaaccgaggcatgtggatatgagttgaatactcactgctggtggtggacacagagctctgatgggtgaaacctgcatagagaaggagggaggagagtgggtaagagacaaggagaggtgggggaccaaatggaggtcaatgctaccctggtgcaatgaaccgagtttcatggtacagggacaattgaagattttctatcagcatcctcacatcaggaaagaatgccctgagggaacacagtccatgatggtaaggaaaccatgaagtccagaccttagtcatcccatgtagagcacatgacagaattttcaaaggccaggcagggagtgtgatctctagttagagattagaggctgcccagcaagggggaagagatttcaaccacatcacagccactcaccattgacatagagactgttcctgtccagggtgtaggggcccagctcttcaatgtcattggtcagtttgcttagctcccagtacagctgctccctgttgagtccagggcttttggggtcaaggcggtgggtgcagatggcatccactccagtggctgccccatctttctcgggcctggggagggtcagtgggaaaaatcacaatgaaaagtttatctaggaagggtcttgcgattgctgagggaaggacagcaaggaccagagaaatgagaaacctgggaaagaggtgagaagccacatcgactcttagtgcatggactattggcttgctgaggactgtgagtggagtcacggatacagtgacaagatgaaactgacactttcatggacgggacggggagccggacttgagcccagtgaagagctcgaaatgaggatgaaatcacgtggataaggcatgattgtcctgaaagaaatcctggggacagaatttaacatgtaaaggaaagggaggcacagggaatggagggaattcagagggatgataaagggagaggctcaatcctgatgatgggccatgcagattctctctgttgaggtggagtgtaggggtgttactgtcaggaaacacactgatcctgaagcctgtgactcctgaattccacctttggtgaggatatccctaggaagtgcagcaaggaagcagtgcaaagtcttttggagtgagtacaagtggggcagccaggctggaaattctaagttctcacctgagcaaggtcaatctgcagccagagtacagagggccaacactggtgttcttgaacaagggcttgagctgtggaggagggagagggcagtgagtaggagggctaagttttatgtaagagccaggcagaagtgaggtgggcagggctggccttggtgggggaggcttgcatctctctctttttttcttttttttgtgagatggagtttcgcttttttgcctaggctggagtaaagtggcatgatcttgactcactgcaacctctgcctccttgattcaagtgattctcttgcctcaccctcccaagtagctgggattacaggcatgcaccaccatgcttggctaatttttgtattttagtagggatgaggtttcactatgttggccaggctggtcacaaactcctgacctcaggtgatccacccgccttggcctcccaaatgctggtattacaggcgtgagccaccgctcctggctgaggcttgcatctcttggggcaaaagtgagttgggtttgatattcttccattgccctggcatggatgatgtaagagggactgggtatcatgagcagggcagagtgtggagggcaggacactaaccagaccctgcaggacactctccatggtgttgaacttcctggagccagtgcgacgcatgtcctcctcgtactgcaggttggtgatggtgaagttgagggtgaacggcatcaggagagggccagcagctatagtgggagtgtgaaataaacattatgttcaaagtagagagaatagcactttgtaataaccatatgcagcaattaaattgagtgacataataaatattttccacgcctttcttatctatgatacaattcattttctaaagtagattatataatagtagttagatactgagcatagctcttggtacatatttagtgctcaatattgtaaggtgatatctgttatctttattatcaccatcaccatcatcactatcattgtcatcattattatcattattgtcatcacaagtaccaccagcaccaccatgacaatccccatcatgaaccacaaatatcatcatcaccatcatcacattcaacatatcattaccatcataaccccaccaccatcaccgacatcatcctcatcaccatcattgtcactgtcgttgatatcaccattaccatcatcaatgtcactagcataataatcatcatcatcatcaacaccaccaccatcatcgtcacactcaacatatcattattaccataataacccccaccaccatcaccagcatcattttcttcaacatcatcatcatcatcattgtcatcaacatcactatcaccatcaacagtatcaccagcatcatcatcatcatcatcatcatcatcgtcatcaacagcaccaccaccaacatcatcatcatgacaagaatacaagctcactgagagcagaaattttgtattggttttgttttccctcctgtatctctaggatctggtacacactaggtggccaacaaatttcgttggtccactcactatcagtagatttgctatgattttccatcttcatctgagtaaaaatgacagagatagcatgctctaatagagatgccattgactggtacttactcgtggggctggggctggaggatggagtccctgaggttcccacatccactgtggaggtcccaggagctgaggagaagtcctcattagtgagagcagaaagcattaccatggcagaaatgccaagaggtgagacttttatagggtttgctgcatgtgggcttgagctgagtctgtctttgaaactggggcagaggggagcttgaataacttctgccttcccagctactttgctcaagaggaggacttatgggtttatgaggaggggcagctcctgctttgcttggtgtaggatcatgggcatgtggacatgagttgaatactcactgctggtggtgggcatagagcttcgatgggtgaaacctgcacagagaaggagggaggagtgtgggtaagttacaaggagatgtgggggaccaaataggggtcagggctaccctggtgcaatggaagcagtttcatgcagcagggaccattaaagatttcctatcagtgccctcacatcagggaagaatgccctgatggaattcattccatgatgatgaagaaaccatgaagtcctggccaggtgtggtggctcaagcctgtaatcccagtactttgggaggccaaggcaaggtggagtagaaggtcaagagattgagaccatcctgaccaacatggtgaaaccctgtctctactaaaaatacaaaaattagctgggtgtggtggcatgcacctgtagtcccagctactcaggaggctgaggcaggagaattgcttgaatccgggaggcggaggttgcagtgagctgagatcatgccactgcacctcagcctggtgacagagcgagactccatctcaaaaaaaaaaaaaaaaaaaaaaagataccatgaagtccggaaattagtcatcccatgtagagcacaggaccaaattttcaattgcctgacagtgagtgtgacctcaagccagtgattacaggctgctcagcaaggaggaagagcctccaaccacatcacagctgctcaccattgacatagagactgttccggtccagggtgtaggggcccagctcctggatgccatttgtcagattgctcagctcccagtacagtcgctctctgtccagtccgaggtcttcagggtcagggcgatgtgtgcagatggcatccactgccgtggctgagctatccttctctggcctgggtaagaacctacatatgcttagtccatccacctctccatccttttgtccttcctttccactctttgtcaacccctaatgcagactctgagaaaattgtggttaacaagaatgtggctctcaggctaggcatggtggctcatgcctgtaatcccaacactttgggaggccaaggcaggtggatcatgaggtcaagagattgagaccatcctggctaacatggtgaaaccccgtctcaactaaaaatacaaaaattagctgggcatggtggtacgtgcctgcagtcccagctacttgggaggctgaggcaggagaattgcttgaacctaggagccaaaggttacagtgagccgagatcgcgccactgcactccagtctgggcaacagagtgagactctatctcaaaaaaaaaaaaaaaaaaaaaaaagaatgtggttctcatcagagagatgcccaccataaacaaattactaggattattagtggaagcagaaagcattaccatggcagaaatgccaagaggtgacacttttatagggtttgctgcatgtaggcttgagctgtctgtctttggaaccggggcagaggggagcttgaataacttctggccttcccagctgctttgctcaagaggagggcttatgggtttatgaggaggggcagctcctgctttgcttggtgtaggatcctaggataataatgccagggatctgcatggccccgaataagcctcctgaagtactaggtgtgcgacagctatacttagggttaatctgtaatccatggcagtggcccttgtactggtgcacgtagcagtggccctcctactggtgcccatggcatggcgttttcaaatggtgggatcagaaggttcaagtcatcctctctagatcctatggaccagcagggctaggagatttgttatgagactcaagggagctaaatggcttggggaaaatgccctttttggctggtccgtctgaaactgtggctggtccaacatgcagtcagaaggtcttcatgtctcagcacctgttcccggccacaggatgtggactcacctacctagccacccactattgagtgattagagggaaacgggctctttccctatgtcccagggttgtgagtagctctatagtaggaacgactttatagtaacaactaccatttattaaatacttcctatgcagcaggcccagcattttgtattcataatcacatattttcatcctcaaacatccctatgggttggtactgctcaattccccaagtcagtactatactaattatattatgtataacacaattgtatataacataaaatatataaaatgtagatctgtaaatataaacttaatatagaaatatatgatatcgttttgcattttatacattactatattatatagtatatacaatatatattattatacctctacctaacatatattaaactggtttatatataactattttatataattatataactctataactattatataactattttttatataactaccatatacctctacttaacatatattaaactggtttatatataactattgtatataactatataactatttttatataactaccatgtacatttagatgcttcttgactcatgatggtattatgtcctgataaacacaggttttttattttatttttttgtttttgctttcttttgtttttggagatggagtctcactctgttgcccaggctggagttcaatggtgtgatcttggctcactgcaacctctgcctcccaggttcaatccattctcctgcctcagcctcccgagtagctgggactacaggtacccaccaccacatccagctaatttttgtatttttagtagagatgggttttctccatgtttgccaagctgatcgtgaactactgacctcaggtgataaacctgcctcagcttcccaaactgctgggattacaggcatgagccatgcacccagcctgttttttgttttttggagacaagagtcttgctctgtcatccaggctggagtgcggtggtgtgatcttgactcactgtaacttccatctcctaagttcaagtgattctcacgcttcagtctcccgagtagctggaactacagttgtcacaccacgcctggctaatttttgtatttttagtagagacaagattttgccatttggacagcctggtctcaaactcctggcctcaagtgatccacctgcctcagcctcccaaagtgctgggatgacaggtgtgagccatcatgcccagccctgacaaatccattgtgaactgaaaatgtcataagtcaaaaatgccctgtagccgggcgtgatggctcacacctgtaatcccaggattttgggaggccaaggtgggaggattccttgagcccaggagttcaaggccacctgggcaacatggcaagaccctcctctccacaaaaaaaaaaaaattaaaaaaaaaatagccaggtgtggtggcacacacctgtagtcccagctactcaggaggctgaggtaggaggatcacttgagcccaggagttcaaggctgcagtgagctatgatcgcaccagtgcattccagtctgggtgacagagcaagactctgtctcaaaaataaaaataaaaataaaaatcgactatacctaacctacagaacatgataggttagcctatcctaccttaaacatgctctgaacccttacattagcctacatgtgggcaaaatcacctaacacaaagcctattttataataaactgttgaatatctcatataatttattgaatattgtactgaaagtgaatgacagaatggttgcatgggtgttgaaggtatgctttctactgaatgcatattgctatggcattatcacaaagtttgaaaaatcataagttgaatcattgtaattcatggactgtttatatatagaatatatactaggtatatgtagaagttgtatgtatccacatgtatactatatataatatatatttaaatattacatgtatttatacttatatactttaatatattatatatacacattatattatacatgatatacgttatatgtaatatatataatatgtcatattataacatatgttatatgttaatgtcagatatgttatatacatcacatacacatatatgttatatacattatatataacatataagttatacatatgttatgtatgtatatattacattatatataacaatacataatgtatatgttatatgttgcatataatacgtaacaaatacaatgtatgcattatatataacaattatgtataatataattatatataatatatcatatataacatacattatatgtaacataatgtatattaaactgatttataaaatattatgtatatgttacatatgacagtataagttataacatataatattgttatattataacatatattatgttataacatataatattgttatatcatatgttatatgttaatgtcagatatgttatgtacatcacacatacacatatatgttatatacattatgtataacataaaagttatacatatgttatatatgtatatattatattatatataacaatatataatgtatgttatatgttgtatataatatataacaattatataattatatataacaactatatattatatataattatatataacagttttatataatatataattatatataatatatcatatataacatatacattatatgtaacataatgtatgtgttatatataacttgtactatatatgctataacatatataacatgtatacaatataacaatatgtataatatatacattatatataacatatgttatatacgtatataacatatgcatataaaaatgtgtctataaacatgtttataaaatatgcctcaatatgtatataaaatatgtctatatataatatatgtattttatatatataatatgtcaggaaatagggcacagaaggcttcaggcacttgctcagagtcacagatagtaaatggcagagctgggttggttcagaactgaggtctgcctgagttcaccaatgctcttagccactagggcccccctgtcccctcttccccctgggaaggaaaggaagctggaggtagatgactgacactctctcttgggagagccacacttggagattctgtgagagaggtgtggaaggtgagaatgccaggcaggaaatgatatcaaccgctgtctaccctaaaagacctgccctttccagcactcagggacagtgccctcggtgcctctcagtcaccctcagaccggccaggccctctgtggctgcatctgagccactcaggagctgacctcctgcctgtaagggctgaacgccttcctttcctcccctcttagattctctgggcaagttcccttagagggaagtcagattggggttttccacatgctgcaagttcataatgggggcagaggaggaagtgccacctaagggataggagtttggatatagaacctgaagtgctgcagttgctttgtgtgtcctggcacaagccacttaatctgggcctcagtttccccttctgctcctgcttcatgaggctgttgcaagcactgatgaggcattaaatataaagtacataatgcagtgccttgggtcttaggaatagttatctgctgctgctggtggtgatgcttagtatccatgggcaatagttgttccaagtatgaacagagtcagggagcccagagactagggtcatattcacctgttgggctgtgtttttcttaaggagcgtctcacctgagtgaggctagtctgcagcctgaatagaggtattccagactgctattcctgaacaagggtttgagctgcaaggaaggagaggggaggtgagaaacaacagctgcgggaagccaggaagagtggggcattggaggggtggaccagggtgaggtgggcgtggctgaaatcagtgggcggggcagggaaaggtgggcgtggctggcatcagtaggctgggtggggtgaggtgggcttggctaaaatcagtgggtggggcagggaaaggtgtctggggttggatgaggtgggcgtggctggcatcagtgggcgaggcagtgtgaggtgggctggtttgtctaagtgggcgagggaggagtacggtgggcggggctctcaccagaccctgcagttctctctctgtggcgttgaacttcctggaaccagggtgccgcatgtcctcctcgtactgcaggttggtgatggtgaagttgagggtgaatggcaccatgaatgggactgtggctgctgcaaggaaggagaaaagaaggccacgcctgagtcagatctgaactgactgtaagtcaatttctgaggacccagacggagtgcttgaagcaagagtctgaagcagacaggtgggtgctttagtttggacggataatggaaagccaggtaaggagaaaagtgggatgttcctaaaatgcattacctgggcccagaagcaggttaggggaccagaagcaggttaggggaccagggtaggtgtattgggtcagaacgtgtgcctactggaagctgaggtctcagactctgccaggtgcccatacccgccctaacaaactctagctgagaagttaaaagggaaaaggaccggaacagtctcatgctttggggaacaagaagggaaaaaagagtcaactcaatcccattgaacactgaacaacaacaataaaaatcaaacagcagtccttaaagcagaccttctctcacctgctttacttggctacccttccccactcaagcccaaaactcccaaaactcccagaacttgcccttcctttaataaagaggagaccacatggtagagagacatagttaccatggttacggccacactagtgagtcagatttggtttcaaatctcctctctgcccctcaccagccaagtgaccatggacatgttacctgtccatacctcagtttcttccgctgtaatacaatgggcaatatgggtcgggcgcggtggctcacacctgtaatcccagcactttgggaggccaaggcgggcagatcacttgaggtcaggaattcgagaccagcctggccaacacaatgaaaccccgtctcgactaaaaatacaaaaattagccaggcgtggtggcatgcacttgtaatcctggctacttgggaggctgaggcaggggaatcccttgaacccgggagacggaggctgcagtgagctgagattataccactgcactccagcctgggcaacagagcgagactctgtctcaaaaaaaaaaaaaaaaaaaaaaggcggcgaggggcataatgatattttggagggaaattaggaaggttacatgactgttaaaaagagcacatctccagggcattacactgagtggaaaagaagccaatttcaaaggtgacatgttgtacatttccatttatataacatcttcaaaagaaaattgtagagacagagatggagatggagagtagaatagctattctatgcaatagtgttgggctcagtgggcatgattacgaaggctagcatgaggggaatctttgggggaatggaacagttctgaatcttgatggtggtggtgattatagggctatgcccatgtgataaaaattgcatagggctaccaacacacacgcacacacacatgcatgcacacacgtgcacagacacacacacatgtgcatacatgcacacagatgcacgcacgcacgcacgcatgcacacacacatgcacacatgcacacacgcatgcacacatgcacatatgcacacacaggcgtgcatgcacacacatgcctgcacacacacgcacatacacaagctcacatatgcacacacgcgtgtaaaaccagtaaaatggattttaacaatgtcagtttcctgcttttgatattgtattagagttatgtaagatgtagccattggggagaaactgggtgaaggatacaggggaatgctacactattttcgcaacatctcctgaatttatttattatttatttcaaaatgaaaagttatttattatttatttatattattatttactttatatttattatttatttcaaaatgaaaagttaaaaataaaaaaaatacatagcatatggcatgccatatagtaagtgctcaataacttggttgtcttttattgtcaattgtaattgcttgttccatttcagtcttgcccaatacactgtaaacttggtgaggggagggactgcatttgacttagtcaacatcttatcccccctgcccagcccagaataggtgcctgataaatatttgttaaaccaaattccctggtagcccctgtgctaggtgttcttacgtagagttgcatataacatttgcaaacaatttatgaaatattattatcctcaattggcaggtgaggaaactgaggtactgagaggatgagtaaattgctcaaagtcaacatggctggagaatgaggaggacccttctcctgctcttgaggagttcggagcagagcgaggattaccatgactgctccaggtttcctcacgccatcctttaccaacatctcccagttatatatataatgtgtataactatatatatagaaatatatatatttatatacagagaaacatacatatataactatatatagttacagatatagaaactatatatataactatatatagagagacactatatatatatgttttatatatgtggttactatatggtaactatatatatggttatatataactatatatatggctatatatagttatggctatataaataactatatataacatatatgttatatgtataaccataaatatatttttatataacatataatatatgatataacatctatctatctaaccaagtagaaactttcgaactgaaacataaagtaactgagataaaaagaattcaatggatgggcagaatggagctggtagagaaaaggcttggtgattgtgaaaatattctataaaaattattaaacctgggccgggcgcagtggctcacgcctgtaatcccagctctttaggaggctgaggcgggcggatcacgaggtcaggagattgagaccatcctggctaatacggtgaaaccccgtctctactaaaaaatacaaaaaattagccgggcatggtggcgggtgcctgtaatcccagctactccggaggctgaggcaggagaatggcgtgaacccagggggcggagcttgcggtgagccgagatcgcgccactgcactccagcctgggcgacagagcgagactccgtctcaaaaaaaaaaaaaaaattattaaacctgaaattcggagaggaaaaaagattgataaataacaaaatgaacagaacctcagggtctcttcgggcaacatcatttcattggaggtccgaaggggagaaagaatcagagcagaaaataaacactttgagactcaagaagctgagaacactttaagcaggataaactcaaagaaaaccatgcccagacacatcgtaatcaaactactgaaaatcaatgatgaagaacaaattttgaaagcacctagaaaaagtgacagcattgatcatggaatgacttgctttgtaatacatgttacatacgtacaagcccagaggggttaggcatgtcacataaatggttgaattgattagagcagagcagtgaggaagtggagagtgaacatcctgtctacagcatgtaaaaagtttgcagtgttgtgactcacaaaacataaggcctgaaggcggaattttaattacgggacaccaggttctatctcataactccagaatcacaaggcagggttaagggttaggaatgcccgacctccgtctttttttttttttttttgagatggagcctagctccattgcccaggctggagtgcagtggcacaatctcgaccactgagaaaatttctggctgaggcaggaaaattgcatgaacccgggaggtagaggttgcaatgagccgagatggtgccactgcactccagcctgggtgacagagcgagactccatttaaaataataataataataataataattttaaaaaaattagaaagttgagaagataccaaccatagctggtccccaggaatcgctagtgcaaagctctcgaggttagacagaggttagggtgctagaagaccactcaaggcagggtggtcaaaatttagagagtgggcctggcgtggtggctcatgcctataatcccagcactttgggaggccaaggtgggtagatcacttgaggtcaggagttcaagaccagcctggccaacatggtgaaaccccgtctctactaaaaatacaaaaaattagccaggcatggtggtgtgcacctgtaatcccagctactccggaggctgaggcaggagaatcacgtgaacctgggaggcgaaggttgcagtgagccgagatcacaccattccactccagcctgggtgacagagcaagactccgtaaaaaaaaaaaaaaaaaaaaaaaaaaaagagagagagagagagtgagagggcgagtggaacaggctgagtctgggtggtcagcagggaacagaccatgcagtgttaaatttcatagatgccagagaggagcttcctacctgtggagctggggatggaggatgtggaaatccctggggagaatgtagaagtcactggagctgagaaaaaaagaacatggagaaatgattgggtgtcttcctaaaggaatatgggacaggaactgctcattggaatttggacttctatcttgactcacaccaagaccttgacgggttaggggctgctctgaggctgtggctgggcacgtagggagggagaatgatcagtttctcttctgaggaatgcaccttggggaggaagggtcccaagggcattggaatatcacaggtttgaatactcactgctggtggcaggggtccagtaccgacggttataacctgcagatagggaggaaagagtaaagaaggacaattatgatgggtgagaggtaggggaggggaagatggtagatccagaaatggaaataatgggaaactttcatgatgagcccatctgggctatccctcagccagccagagggaggggaggggcttccaccttcgatgtgtgacttcagctcgcaagggaacctccatctctcagcccagagtggccaaagttgaacaagtcatggacatttcattgagaagaggtggggccaagatcttttgtgaataaaggataatggctatattttatttggtacatattttgtgctttgtcctttgacaataatggtggaaatcatcactattattattcctgaaataaaaataccataatagctgtccctatttattgggaatctagtatatacaaacaataataataaatacattacaagggtggaaagacacatgtatggatgagtgtgctttctacccataaagataatttagtttgattcttactctctcagcttacctcctttcacaaaatttcatgatagtataatttttttccaacttactttctctgtgtgtgtgtgtgtgtgtgtgtgtgtgtgtgtgatgtagaattgacaaaaatgtgatgggtgaagggagtggtgtttttaggtaaaagtacagagaaatgagggatagaaacggttcatatggggccgggcttggtggctcacgcctgtaatcctagcactttgggagaccgagatgggcaaatcacttgaggtcaggagttcaagaccagcctggccaacatggcgaaaccccgtctccactaagaacacaaaaattagcgtggcgtggcggtgggcgcctgtaatcccagctactcaggaggctgaggcaagagaatctcttgaacctgggaggcggaggttgcagtgagcaaagatcgtgccattgcactccagcctgtgcaacagagtgagaccatgtctcaaaaagaaaagaaaagaagagaaaaaagaaagaaagaaggaaaggaaggaaagaaaagaaagaaagaaaggtttcatatggtttggaatattggagaaaatttggcaaaataggtgtggtggtaaaaacaagagacttcaggatgagaggggtggtgttgccattggagcaagaaaggaactggggaaaagagaatttgtcctgagtgtttctctaggtcatggattgcatctcctttgaggctctgtgagagatacaaggaaagacagaacccagggcagccctgttatttatctgggttgttcctgaattatctcatttgattatcagaacaatcccacgtagtatttttattccattccacagaggggacactaaagtctggggaggttacatggcttgtcctgcatccaacaaaacagacatctgtctgtcattcaatagtaccacactgttaagccatgccctaaattagtcataatcctatggacacagaacaggatgtgtacttgatactacaatgaaatactttctgtgtattatctcctatgtcaaggatagaggagtatatatcctctatttcaagtcagatataaaggaaatctccaagtggattcagaagggaagtaacaaattcagcattaggttagatcattagcatagaggccattcatgcctcattcctgtcctgagattggggcttgctctatttggacgatccacagtgatgtcttgtagttaggagcctggagttttcatgagtctccaatcttcggttggagttttcatactgtcctgtgtcataactgagtaattctgggctaattacttcctccctggatgcataaatgctctctgtagaaatgagtatagtaactcacggaggtttgggtaatattaataggagataatgcatataaagttctcatcacaattcctggcacaattcctttttttttttttttcagacggagtcttgctctgtcgcccaggctggagtgcagtggcacaatctcagctcactgcaacctctgcctcccaggttcaagcaattctcctgcctcagcctcccgagtagctaggattacaggcacatgccaccaagcctggctagtttttgtatttttagtagagatggggtttcaccatgttggctgggctggtcttgaactcctgacctcaggtgatctgcctgcctcagcctcccaaaatgctgggaatataggtgtgagccactgtgcctggccctacagtttccttttgatgaaaatgagctgctgttatggttgctattctggtggtggcattgctgcttgggtcattgttgccactgatgttgtgtaaacagttattatttgaggggtatttgctcagggtggggttatttcatgaagtcagtggattccactggcccatggaaactgagaatttgccttgagttgtcatgatggagaaaatgaaggggaggagggtgaactgggcacccagggcccactgcggagactcaaccataggaccctccctcacccatttctttccccgtcgtctgcaaactccagctgggctcttacaggatcaaggtggaggaggaaacatttcataccaggaggtgaaagggaagaggaaattggcctcctttgatgtgctaggcattgaaagatgagccctcagagaactacgagatttgtaccagaacttggaatctgtgtacagcagatgctcaacctcagccctattgacattttggtctggataatgtgttttgataggaggctgctttgtgcattgttggatgttttgcaacatctctggcctctacttactagatgccattagcaaatggccgggcatcatggctcatgcctgtaatcccagcactttgggaggccaaggcaggcggatcacctgaagtcaggagttcaagagcagcctggcgaacatggagaaacctcatctctactaaaaatacaaaattagctgggcatggtggcacatgcctgtaatcccagctactcaggaggctgaggcaggagaatcacttgaacccaggaggcagagtttgcagtgagccaagatggcgccactgcactccagcctgggcaacaagtgtgaaactccatctcaaaaaaaaaaaagttatatgtggatttttgaatgcataggggtcagcaccctgaaccctcatgctgttcaagggcccagctgtagtaataattgccaggaaggaagtgagcatagaggtagaatagagattggctgtgtgcaagatgcgtatacgggggaaatgctactttataaagggtgatccaagctgagatttgaaggacaagaacaccaggtgcaaagactctgagggtggagggatgtttggaccctggaggaaaaaaaaaatgaagctgatatggccagagatgattggacacagcttattcacttactccgttctaaaaatggacactgaagcctggagaggttacatggctcttccggggccacacagtgagcaaaagagaggaccaggacttaaagcaagacctgtaatttaccaaaacctacaccattcattactgcttttaagtcagagtcggtctcaatgaatatatatatatatatatatatatttttttttttgagacagagtcgctctctgttgcccaggctggagtgcagcggtgcgatctccgctcactgcaagctctgcctcccaggttcacgccattctcctgcctcagcctcctgagtagctgggactacaggcatctgccaccatgcccggctaatttttttgtgtatttttagtagagatggggtttcactgtgttagccagggtggtcttgatctcctgacctcatgatccactggcctcagcctcccaaagtgctgggattacaggcgtgagccactgcacccagcctcaatgactattgaaatacaagtttttggcctggtgcagtggctcacacttgtaatcccagcactttgagaggccgaggctggaggatcacttgaggtcaggagttcgagacaagcctggcccacattgcaaaaccgtcgtctctactaaaaacacaaaaaattagccggtgtgatggtgcgtgcctgtagttccagctactcaggaggctgaggcaggaaaatcgcttgaacctgggagaaggaggttgcagtgacccgagatcatgccactgcactccagcttgggcaacagactgagactctgtctcaaaaaaccccccaaaaaacaaaaaaacaaaaattagccaggcatagtggcatgtggcatgagaatcgcttgaacctgggaggcagaggttgcagtgaaccgagattgcaccattgcactccagcctgggcgacagagtgagactctgccaaaagaaggaaagaaagaaaaagacaggaagaaaggaagaaaggaaggaaggaaggaggaaggaaggaaggaaggaaggaaggaaggaaggaaggaaggaaggaaggaaggaaggaagaaaagaaggaaggaaggaaagaaatggaagctttaaatccaggcaaaaagaaagtgtccaaggtggtatagtgaggacatcattaaacaagcattagcttaaattgttggatgagattggacagaggggaacacgctgagacttggtgggcatcaggactcagaccacacagcaattaatcagccactgaatggcagccgacgtttcatgggagctggaagccagattcctacctgtagcgctgggggtggggctcacagatacgagaggccttggagagaacatggaggtcatcggagctgaaagaaaacgcagcgtgaatcgggtttgttgggtcctatcatttagcgaggggagaataggactcttggtgagcactggcatctgtgccttggctcagcctgagacttttgctattctggagtttctgtggggatgagaacctagggaatgggggatactttcctcctggaaggcaggcttagggaggaagaattcccagggcatagggacttcagggccatgtttactcactgctggtggtggagatccaggaccgatggttataacctgcagagagagagggagaggaaggaagaacgaatcagagtgagaagacaggaggaagttaagagaggaaggaggggtagaactcaaaacacaggtgcaccaaccctcctgtgtgctttctctgaggttcattcatgaataacaacagctggggaggctgaggcgggagaatcacatgaacctgggaggcagaggttgcagtgagccaagattgtgccgctgcactccagcctgggtgacagagcgagactccgtctctaaataaataaataaataaatgaataacagctagtctttttttgtttggtttagtttttgtttgtttgttttgttttttgagacaagagtctctctctgttgcccgggctggagtgcagtggttcaagctcatctcactgcagcctccgcctcccaggttcaagtgattctcctgcctcagcctcccaagtagttgtcattacaggcacacgccaccacacctgactaatttttgtatttttggtagagaccaggtttcaccatgttggccaggctagtcttgaactcctgacctcaagtgatccacccactttggcctcccaaagtgctgggactgcaggtgtgaaccagcacgcccagccaacagcttggtcttattagttaactgcctcctacactgatgctcatgatatcctcaccctcattatcattaacaacaatgacaataatcaatcgccagaggccccttcttattgtgggggttcactatgtggctggaatactgccaccttcattaaataaatgatggggacaaaattttctgtttccagccttatttgtgtttccttcatccattacgtataattttgtcattgctgtctgagtttctcctctttcccaacttttcaaagacaggaaagacttttggcagtatagtttctggaattctttcgtgtgaaattgagataataagaggggagggaaagagagagagagagactgactatggggaggggagaggctagggggtccgcaggagatgataaagttgcagaatgagaagaaatgaggaaaaggggattttagtaagtagggtatgttctgaaacatgaattagatcctctttggcactctgtgaatagtgcaaagaaaatttagacttattttacatttgatggtctgactgattttcttgaaacttctgagactggtccaagtggagccctgtggtttacttgggttattaggattttatcttatttgatcttcacaataatcttaggtgacattttaaacattaaaaaaaaatccattccgaaaatagggccaggtgaggtggctcctacctgtaatcccagtactttgggaggcccttgggcggatcacttgagatcaggagtttgagaccagcctggccaacatagtgaaatcccatctctactaaaaatgcaaaaattagctgggcgtggtggcacgcgcctgtagtcccagctattcgggaggctgaggcaggagaatcgcttcagtctgggaggtggaggctgcagtgagccaagaccgtaccactgcactccagcctgggtgccagagggagactctatcaaaaaaaagaaagaaaaaaaaaaaaggacactgaatcctcttgacaggattagtaagatctaacagatatggccgggcacagtgtctcacacttgtaatcccagcactttgggaggccaaggcgtgtggaccacctgaggtcaggagtttgagaccagcctgaccaacatggtaaaaccctgtctgtactaaaaatacaaaaattagccaggcacggtggcgtgcacctgtagtcccaactactcaggaggctgatgcaggagaattgcttgaacccaggagacagaggttcagaggttgtggtgagccgagattgcaccactgcactagggagaatggggaatgggaaattattccttcagtcctgtttggggtgataaaaaaagttttgaaaacagatagtggtgagggttgcacaacaatgtgaatgtattagtactgctgagttgtacaattaaaatgtttagaatggcaatttttatagtatttatattttaccacaataaaaaagttattcttacttgttcttgaggtcacactctcagaggccaaggtggacatcccaggtgtggtcagaggagtaaagaggcttccagccagtgtattgaaggtggttgttgtcttggccacagtgggactggaacctgtggtagctaaattagtggcttcaaccattgtagttctcaagatagtggttggactcactccttctccatgactggttttaggtggtgttggcatctctgatggtatcaaggtcatagtggtgcctgtgacagtcctggaaaattctgggggtccaactgaagttacagatggtgaggtttctgtgttccaggaggtcacagtttggggcttatcagttgttatagaggcactggaaagcccagagacagcaggggaaacagtcagagttagagtactcgtgctggtctctgctgaagagctggtggccagtaagcctgtagtctctagtaaaccaagggaaagagttgaagttggaatcattgtgctggtttctgtccctggatgggtggaaagtggggctgtttttgcagaaacaccaggtgaagcagttggacttagatcaactctgctggttccagttacaagtagggtgaagagagaggatgttgtctgagttgggagagctgtgctagtctctgcaccaggtctaatggtgagtgaggctgtggtctctgatacttgaggaaacacagttgaagcaggaaatgttttacttgtctctgttctgggatgggtgctcaataaggctgtggtctctggcataccaggagaatgagtcaaagttggaacagttgtactggttgctgccccagaactagtgatctgtgaagtcaccatctctggtgcaccaggtgagattgttgtcagtacagctgaactggcttctgtcctaggactggtggccattacaggtgtggcatctggactactatgggaaaaactggaggttgttctggaaacaggtgtgctggtctgtggaggatgagtgacccaggaagccattgtatctggctcactagagggaacagtccgaattggaacagtgaagccagtctgtgtcccaggatgggtagctgatgaggctgtggtctctggttcaccaggagaaggagtcaaagttggaatagctgtactagtgtctgttgcagaactagtgacctgtgaggtcactacccctggtatactgggtgggatggttgtagttggaacacctgacctcgtgtctactccaggactggtgaccattgagggtgcagtgtctgatcccctatgggaaaagttgggaattgtcccagaaaccgttgtgctggtttctgcaggatgagtgagccacgtggctgtagtctctggttcatatggggtctcactcaatgttgggaaggttgtactggtgtctgtcccagaactagggaccagtgaggtcaccagatctgacatatcaggtgagatagttgtcgttgaaacagctgaactggcttctggcccaggactggtgatggctactgggagtgtggtgtctgacttactatgggaaaacttgggagttgtcctgggaaccattgtgttggtctctgcaggatgaatgagctgtatggctgttgtctctggttcatatggggtctccgtcagtgttgggaaagttgtagtgctgtctgtcccagaactgatgaccagtgaggtcagcatctttgatgcaccaggggagacagggagagttggaatggctgaacttgtgtgtgtctcagaataggtgataaatgaggttgtggtctctggctcaccagaagaaagagtcagagttggaatagttatactggtgtctgtcccagaactagtgacctgtgaggttaccatatctggtacatcaggtgagacagttattgttggaaaatctgaagtggcttctgccccaggactggtggctattgatggtgtggtgtctggttcactatgagaataattaggggttgtcctgggaactgttgtgctggtgactgcaggatgagtaacccatgaggctgttgcctctgattcatgtggggactcaggcactgttggaaaagttgcactgatgtctctcccagagctagtgaccagtgatgtcagcacacctggtataccaggtgaaatagttgttgaaatggctgagctggattctgcctcaggactggtgactgtagaaggcatagtgtctaattcactgtgggaaaaccttgaggttgtcctgggaagagttgagctactctctgcaggatgggtgaccaatgagatatttgtaaacggctcaccagtggagacagtcaaagttggaacaacagaacttgcttctgtcccaggatgagcgacccatgagtctatggtctctggttgacttgaggcaacagttagatttgaaaacgcactggtctctgacccagaactagtgaccagtgaagtcaccagcccttgtacagtaggggagacagctaaagttggaatggctgaaatcatctttgcctcagaatgggtgaccaatgaagttgtggtctctggttcatcagaagaaatagtcagagttggaatagttgtactggttactgctctagaactagtgaccagagaggtcaccattcctggtacctcaggtgaaacagttagaacagctgagctggcttctaccccatgactggtggccattgaaggtgtggtctctggctcactagaagaaagagttagaattggaatagttgtactggtcactgccctggaactagtgaccagaggggtcaccactcctgataccccaggtgaaacagttggagttggaacagctgagctggcttctgccccatgactggtggccattgaaggtgtggtttctagttcaccaggagaaagaatcagagttggaatacttgtactgtttactccactagaactagtgaccagagaggtcaccactcctggtacctcaggtgaaacagttggaacagttgagctggcttctgccccatgactggtggccattgaaggtgtggtctctggttcaccaggagaaagagtcagagttggaagagttgtactggttactgccctagaactagcaaccagagaggtcaccattcctggtacctcaggtaaaacagttggaacagctgagccagcttctgtcccatgactggtggccattgaaggtgtggtctctggttcaccaagagaaaaagtcagaattggaatagttgtactagtcactgccctagaactagtgaccagagaggtcaccactcctggtaccccaggtgaaacagttggagttggaatagcagaactggcttcttccccatgactggtggccattgaaggtgtggtctctggttcaccaggagaaagagtcagaattggaatagttgtactgatcactgccctagaactggtgaccaaaggggtcactactcctggtacctcagttgaaacagttggagttggaacagctgaactggattctgccccatgactggtggtcattgaaggtgtggtgtctgatttactatggaaaaaaatggaagttgtccagggaactgttgggctggtctgtgcaggatgcgtgaccaatgaaactgttgtagctggttcaccaggggagtttgtcagagctcgattagttgtacttgtctttgccgccaaactggtgaccattgaggtcaccaaccgtgatacagcaggcgagatagttgaagttggaatggccgaacttgtctgtgcttcaggatgggtgactaatgaggctatcgtctttggttcaccaggagaaagagtcaaagttggaatagtcatatttctgtctgtcccagaactagtgacctgtgaggtcaccagatcttctgcaccaggtgagacagtcataattggaatagctgaactggtttctgccccaggactggtggctattgaaggtgtggcatctgattcatgatgagaaaaattggggattgttctgggaatagttgagctggtctctgcaggatgagtgagccatgtggttcttgtctctgtttcatgtggggacttagtcagtgttgggaatgttgtactagtatctgtccccgaaatagtgaccagtggggtcagtgcatctagttcactaggtgagatatttgttggaatggctgagctgacgtctgccccatgactggtggctgtggaagatacagtgtctaattcactgtggaaaaaattgggggttgtcttggaaacagttgggatggtctctgcaggatggataacccatgaagctgttgtatctggctcactagaagaaacatctagagtttgaataaccggacttctctctgccccagaacgagagaccagtgaggctgtggtctctgattctctattgaaaacagatggggttgtcctgggaagagctgtgctggtttctgctcccaggctggtagccaatgaggatgtcgtttctggaacatcagggaaaacatatggggttgtgatcatcatttctgtggggattgtgctggccatttgcattgatgcattgaggggagtcagtgttcccaaagtgggagtatagacactggtggtcaaggtggctctggaagtggtcttcagagctgtggtggtggtcttcagagctgtggtggtggtctccattctttttgtccctcctgtgtgtagtcctgtaaattggggaatgggcacacaatttgaacaaaatgattacacttactggacttgcaatagcttatttattctccacaggaggaaagggagagaaatgtctctcggttactaggatgtgtctgggatgcttctggaatgggaaaagagattgtgattggtattcccctatcttaccttggtctgtaacttggttgcatcttcacctataactcctctgtgaattcttgaccgctactctattccctcttcccatgtgtttcctgcactgtcagcctctgagccttgttcaagctcttctctctgcctgaagtgcccacttctcatcagattccttaagttctgccattattgaaatccaagcccacatccacctttacaaattcactccagaactcatctttgcttctcaatatttccttatcacactgtctgaatctgcgttgtaccatccttcacagtctcatttgtaacagctattcacgtttgactgtttggcatacggtaagtgctcaactaatatttgttgaatgattgaatgaatgaatatgtggatggatgtatacttaagtggatctcctctgacttgagagagattaagtattgtgtatcatgtgtttgagagcttgggctctggaataagatagccctgcctgggattctggctctttctctaaagagatgggtggctctttaagttaaaaaatattgctggacctccattttcccgtctataaagtggggataagtacaatggccatctcaaagtgttggtaaaaaggcgccaagcacagtgcctcctgggtcacgataagacattactactattaccacgactatgacctgctattgctactgttattactatcacttctccacctaccattactgctgttattgctactgttactactacctattgcaatggttattactatgattactactactagtactgctactactgttactaccactattactattgctactgttactgctaccactgctactactactgttactactaccaccactctacctaccattactgcagttattactactgttaccacaactattactacctatcactatggttattactatggttactgctacttactattactactgctgttgctattactattattactatcactaccacttaatattactactctacctacagtagagtaacagcagtaatggtagtgctctgtcattactgctgttattactactgttactactaatattactgcctattgctatggttattactatgttattactatggttactactattaatactattgttgctagcactattacttatgatttctactgtcactactaccactgctactacctactgctactactgttactaccaacacaactctacataccattactgccattatcactactattactactagtattactgcttattgctatggttattgctacagttactactacttactagtgctattgctgctattgttactaccactactacttaccattactactgtcactactaataattctactacaaaataaacatttgctaaatagaattctccaccaaccacactagacactaccagagctgaccaaggtgactggaatacctttgaacaagattccagtagcattgatgagacagcagctgctgaccaggctttagaaaatggttcctagggaagaggaagaactaactggaggcttctctataaagcccacaaagcctactggagcttggtagagaaagggggtaaaatgaaagggattttgactctgattatggagcagtgtccctgtgttgctggatatcctctaaaaacaatatgtctgagaatgcactctcaagtgcttcatgtgtatctaacaataatggtgaccatgatggtgattatgttgatgggaaggaggaggaggagcaattgcaaagcacttgacatgcactgtctttttaaacctcacaagaacattaaatggcacattctggccaggcgcggtggctcatgcctgtaatcccagcattttgggaggacgaggtgggcggatcacctgaggtcaggagttctagaccagcctggtcaacatggtcaaaccccatctctactaaaaatacaaaaattagccaggcttagtggcgtgcatctgtaatcccagctactcgggaggctgaggcaggagaatgactcaaactcaggggatggaggttgcagggagccgagattgcacctctgcactccagcttgggtgacagagcaagactccacctcaaataaataaataaataaagtgagataaaataaaataaaatgcacattgtataattcttgtcattttacaggagagaaagagaaatccagagaccacaatttaccaaggtcacacacagctattgacagggcaaaaacttgaacatcatcgtatctaaatcctaaacccatattattaaccattgcattatattaattcactaaaggaacttctggatcttgtggggaccagaatggaaagagaatgaagtgaggtgaaaacgcccatctagtaagatggatcttaggatgcattctccagttcagtggttctcaaccaggggcagttttgcttccaggggacacttaacaatgtctggagatatttttggttgtcacaactgtgtgtgggcagaaggtatggcatctagaacagaggccagagaggctggtaaacatcctacaacgcacagcacagcccccatcgcagagaagtatctgccccaaatgacaatagtgtcaaagttgagaaacccagatttttatttatttatgtatttcatattactgccttttaaagtgaaaattttgtttcagactttattcaaaacagaaggaggaattactaaatattgtgacaaagaaaacatataacagtgatgtcataaaccatcttacatttatatcgtgtttttattccccccattgtacttacatattgtgatttagctctccagtgatgacaaacaaaaataacccaggagctcacccatcttctttatttaagtgacagttaaaaaaaatgtacagttccaaatttttcatcatgggagatataatcctagatatttttgtgaagtttctcttacaagagagttatgtctgtttttcaaccagggcatacataaaggctgttaatttatacttccttttcctacatttgctagaactattgggatgcattttcagacatactctgtctctctctctctctctctctctctctctctctatatatatatatatatatatatatatatatatacatacatatatatatatacatacatatatatatacatatatatatagtatattttatttaaataaaatatatatatatatatataatttatttatttatttttgagctggagtcttgctctgccacccaggctggagtgcattggcacaatctcagctcactgcagcctctacctcctgggttcaagtgactctcttgcctcagcctcctgagtagctgtgattacaggtgtgtgccaccatgcccggctaatttttatattttcagtagagatggagtttcaccattttggtcagactggtctcgaatttttgacctcaggtgatccacccacctcagcctcccaaagtattgggattacaggcatgagccactgcgcccagctcatagtaagtttttaatgagcatttttaaaatttggttaatatggacaaatttgtgaatatttgatgttggacaaaactcactcagcatgccatgaggagaaagagaagtggtaacatctgcctggtaaccattagataaagactcagttcagacagggaaacctatgacaaccacacacaattctctctctaaagaatacaaacattttgtctctctggaggaggaaatatggtcacgagtggcattactgggaggtaagcaaagttaaacctacctttaggactggcaggcgaagtggatgtctgagggcctttgactggtcttatggtacctctgtgtgctgcttcattgggtatttttgtgatgtgttccataatgccatcagttcctgaagatgaaggtggggagaaaaactggggtaactcatctcattcagaagaagagcactgtctaaatggatccacttcattggccacaaacactcctcaagtccatcagtatgaactggagctgggactatgtgccataagtggccacacctgtccatagatccatccacctacctatagatttgtccatccttcctttcattcatccctagatctgatcatctattcttccattttttcttccttttattctttccttctatcacccattcttccttttgtctttcctcccttctttcctttctcttgctttttaaaattttaatttaaaagtttgtatttcaatagctttgagggtacaagtggttttttcttatatggatgaatcatatgtggtgaagtgtgagattttttgtgcaccctcctttcttctttccatccatcttttcttcaatctttacttcatttcatccttctacctttctttccttcaatctatatccccttcaatcctgtcttccatcatctttctttcttttcatccttccttctgtgcatctatccttcctccgcttcatctttgcttccttccattcactcttctctccattcttccttttatccatccaactacacttctcccttctcgccatgccattcatcacttgcttactgaacacccgtgactcaactactgagtcacatagtaacatatgggtcaatagccaccaatgtgtctaaatttagtgtgaattacaaaataatgtgaagaaggagagggagcaaatcattctcctggagatattgtccagtgaggcagaaactcgagtcgttggagggcctctttggatttgtgtccagaacaaaagttggtgccaagctcaaccctttcagaggaatggaatccccaagaagttccttcctttatctactgacctcttggaagtagtgtttcctccttctaggctctgggtgtcttctaccttcttaggtactttgttccctctattttcattaattcactttttcctttcacttatcccttttgtctcttgctcaactcaaagggagaaaccctcccttacgtctacgtagtattttagctgttcttctaatgccctatacctcactgatgctcccttcattagaatccctgagaacccccatgttgccaaagcacttctcacctcatttcaacttggcaattctgtggtatttaacagaacttaccatttctccttcctaaaaccctcccctcctgtggcttctgtgatgccagaacttcttgccttttctgttacctctctgaccactcctgtttagcccagcagttaggagcatgagttcctagtgacacacaatttgagttcttatcctagttctattgctttctagctatatggacttaagaaagttacttaatctccctgtgcctaaatgtcttcatctccaaaataggcttctaataatctctacttcaattagtgttacaattgaggatcaaatagcttaataaaactgcacttgaaacagagtaagtactgttataaatattttctgttgtcattcttattgtcatcatcatcattactagtagtaatattagagcacctatcacgatactgtaatgattcaattatttgcttatttttgtttctccaattccttaacccagtgcctaggagtgaaattagataaacacatgtttgctaagagaatttctggtacaggaataaactagttaactctttttttgcttcttaggaaggggtcatttcctatgagcccccaataatgggattgtaggggctgtgggtccttacttgtcaaccgtgttgagagtgaaggaacttgataagcacttgtcactgttcccagctcaacgctctctgtcattctggtatccaaaatgggtgatgaagatgtcctgcctggttggcttgaagtgtccaaagtactgaccataaccaagcgtccttcagtagtgctgctctctgtcccaagactggtgtccactctatatggggtagctgaagaggaagttatctcatggagggctgggatggttgaagaatcagtggtagtgaaggttgaagaggagaatggcacaggagtggatgaaggcaggctctctgcaatggtggacagagtagcatccccagggcctgactctgtcctagagaatggactacctgaacctgagatggctcgtggaactccagtggtggcaaatgaagtcatggcctctgatagagaaggcatcactgtgccagtggaaatagtctcagctgaaggcagcaaatctgtactcagatgatgagtactttctgttacagacatagtaaacctggattctgggaaggaggttatcccagtggactccgtaatagatggagaagcattaaagggggtgattatgtccactggaatttcagtatactgtgaggctggaggccagtctggggatgatgtttttgcagaagaggtgaaatcagtcttggaactctgtaaaaggtgagtggacccaggagaagaaggtgtatttgttggtgtgactgagctggtgtccagggacatgtttgtcttcctaaatccagaagtcaaatgagaaaatggctcagcctcaaatcctgtggtctcaaaattagcaggcattgatgtggaaatagaggtttcagccatggaagagggagtacccactgggtatgtagccttggatggctccgagtggattgaaacagaggaatatagttcatgtccagaactggtggttcccacattggtcactgccatgcttgaagaaggatgaattttctctgtatctgtggtgacttcagaggcagccagtatttcaactgaggtgccactcagatttggagataaactggttccaggttctgtgcttgtgtctgtagtcttcaccatgcctggggtgaggagtgaagtcacagaaaaagaggaggaagggatactctgcggtaatgtggaagaaacagaaggtgaggtcgtgacaggtaaggacaacagagaagatgaagagctagttttttccacaaagagagagctcttccatgatggattttcaggactcctactcataagagttgtcatctctgagtgtaaaaatctaggaggaacagttgagtgggtccttgccaagggggctgttgttgtggccaaggtaagagtactctgtgctgtagccccaggagaacttttttgggtggtgatggtcatttgtgttgattctgacatcatggatgaggaagagagcctggtgatcacttcagtgatgatgtctggagacatcgtggactgatcagagtcagggatgtgtattctattagaggacatgatttctgtcatggagacttcagtagtagcactagtgggcactccataaaggactgcacttgtttctgtgattgaggtggtctcttcagaggtgctagtctccctgaatccaggagtcaatgagaatgttggctctgtcggaatcctcctagtctcagagaaggcaggatttgatgtgaaaacagtggtatcgtccacagcggaggtgatacccattgaaggtatggttatggttgtttctgagtcagctaggacagaggaatgagattcatgaacagaactggaggtcctcactttggccaccgctgtgtttgaggaaggatgaattttctctgtatctgtcatgatttcagaggtggccggtatttcaactgaggtgctgctcaaatttggagatgaactggttttaggctctgagcttgtatccaacacttctgtagtcttcaccaggcctgggaggataagtgaagtcacaggaagaggagaggaggggctactgtctagtaatgtggaggacacaggagaaagtgaggtcgtgagaggtaatgatgtcagagaagaggaagatctagttgtttccacaaagcgagggctcgtccatgacagactttcaggacccctgctcataagattggtcatctctgagtgtgaaagtccttgagacatagttgagtgggtccctgacaaaaaggtcattgaggtgcccaagggaagggtaacctgggatgtagccagagaataacctgtttgggtggtgatggttatttctgcagattctgtcatgatgggagaggtagacagcctggtgacaacttcatcggagatgtctagtgacattgtggactgagcagggccaggaatggatgttctgctagagggcataacttctgtcctggagacctcaggagtggcaccagagggcatcttgtaaaggacagtgcttgtctctgtggatgaggtgatgtcctgggaggttctggtctccctcagtccaggggtcagagatgacattgactctatctcaatccttgtaatgccagaggagccaggcattgttgtggaaaccatgttgtctcttatagaggaagaggtgaccactggagatatcacttttgttggctctgagaagcctggggaagaggaatagagttcctctgtagcactggtggtttccacatgggacgctgctgtattttcaaaaacgtgaattgcctctgtctccgtggtggctttagaagcggccagactctcatctgaggtgatattcatattgggagctgaagtggtctcaggttccaaacttgcatccaacatgtctgtggccttcatcatgatagaggtgaaaagagaagtgacagggacaggagaggagtggctactcccagatggtgtggaataaagtggcgaaggtgaggttactgaagatgaagataccagggaagatggagggctgtttttttccacagacagcgggcttggccatgacacatcctcaggacctctgctcataggagttgtcaccactgactgtggaaatctctgagttgtagctgagtgagttcctggccaggaggctgtgcttgatgagtccaaggtaaaggtaccctgcgaggtagccccagaaggacctgttttgggggtgatggccatgtctgttgattctttccttgtgaggggggtagaaattctagtgatggtttccatggaggtgtctgatgacattgtggattgagcagggcctgggatggatgttctgctagaagagatggcttctgtcctggagacctcagtagtagcaccagtgggcacactagaaaggacagtgcttttttctgtggcagagctggtctcttcagagatgctggtctccatcaacccaggagtcagtgagagctttgactttgtttgaatcctactggtgtcagagaaggcaggggttgatgtgagaacatttgtatctcctgtggggtaggtgatacccattgaagatgtggcctttgttgtcactgagtcagctaggacagaggaaggagattcatgtgtataacctgaggttaccacattggtcatctccagtttctctgtatctgtagtgacttcagtgatggccagtatttcagctgaggtgctgctcaaatttgggggtgaactggtttcaggttctgagcttgtgcccaacagctctgtggtcttcaccagccctgaggtgagaagtgatgtcacaggaagcgaagaagagtggatgctgtctggtaatgtggaagaaacgggagaagatgaggtcatgacaggtgaagacagtgagaaagaggcagagctggcttcttccacagagggatggcttagccatggcacatctccaggagttctactcataagagcggtcatctgtgagtgtgaaaatccttgagatgcagttgagtgggtccctgacataaaagttgttgaagtgtccaaggtaagggtaccccttgatgtagccccaggagaacctgtttgggtggtaatggtcatttctgtagattctgtcttgatgggggaggtagagagcctggtgatcacttcagtggatatgtcttgtgacattgtggactgatcagggctaggtcctctgctagaggacatgacttgtgtcatggagtcctcaatcgtggcactagtgagtgccttgtaaggaacagtgcttggctttgtggctgagtggatctcctgggaggtgctggtctcccttggtgtgggggtcagggtggatgttgactccatctcaattcttgttatctcagaggaagcaggtatggttgtagaaacaatgtcttttatggtggaagaggtgaccactggagatgtcactttggatggctctgggaggcctggataagaggaatagaattcttgtctagcgctgatggtgcccatctgagtcacagctgtgttttctgaaagctgaattgcctctgtctccatggtggctttagaagtggccagactctcatctgaggtgatattcatactgggaggtgaagtggtcacaggttccaagcttgtgtccaacatgtctgtggtcttcatcatgacaggggtgaaaagagaagtcacccggagaggagatgagtggctactctcagatggtgtggaataaagtggcgaaggtgaggttactgcagataaagacaccagggaagatggagggctagttttttccactgatgggcggcttggccatgacacatcctcaggacctctgctcataggagtggtcatccctgagtgtggagatctgtgagttgcagctgagtgagttcctggccaggaggctctgcttgatgtgtccaaggtaaaggtaccttgtgaggatgccccagaatgacctgttttgggggtgatggtcatttctgctgatcctgtcgtggtgaggggagtagaaattctagtgatggtttccgtggagatttctggtgatattgtggattgagcaggacctggggtggatgttctgcctaaggagagggcttctgttctggagaccttagtagtagcaccagtgggcattccagaaagagaagcacttctctctgttgctgagctggtctcttgagaggtactgatctcccttaatccagaagtcagggaggaagttggctgtgtcatcatagtttctgggaaggcaggagttgatgtggaaacacttgtattccccagagtggaggtggtagccattggagatgtgggttttgttgtcactaagtcagccaaaacagaggaaggggatagatgtttataaatcacagtccctacattgactacaggtgtgtttgaggagggatgaattttctctctatctttggtgacttcagacgtggctaatatttcagctgaggtgctgctcaaatttggaggtgaactggtttcaggttctgagcttgtgcgcaacatgtctgtggtcttcactgggccaagggtgagaagtgcagtcacaggatgaggagaggaggagatgctctctggtaatgtggagaaaaaagaagttgaggtcatggcaggtgaagacagtgaggaagagacagagctggcttcttccacagagggaaggctcggccatggcacatctccaggagttctactcataagagtggtcatctctgagtgtgaaaatcctggagatgcagttgagtgggtccctgaccaaaaggttgttgttgaggtgtccaaggtgagggtaccctctgatgtagccccaggagaacctgtctcaatagtgatggcactttctgctgattctgtcataatgggggaagtagaaagcctggtgatcgcttcagtagagatgtctggtgatatggtgaactgatcaggccctgacatggatgttcccctagaggatatcacttctgtcctggagacctcagtggtagcaccactgggcacttcagaaaggacagtgcttccctctgtggctgagctgatcctctcagagctgctggtctccctcaatccagaagtcagggaggatgttggttctatctgaattctgctggtctcaaagaagtcagaagtggatatggaaacactcgtttcccccatggtgtaggtggtacccattggagatgtggctttgggtgtctctgagtcagataggacagaagattgtgattcatgtccagaaatggaggtcctcacgttggtcactgctgtgtgtgtggaaggctgcatgtcttctgtatctacagtgtcttccaaagtggtcagtctctcatgggaggtgctgctcaaatttgaagtggaactggttccaggttctctgcttatgcccatcctgtctgtggttatcaccaggccagggttgagaagagaagtcacaggaagagaagcggaagggaaatcctctactaatgtagaggaaacaggagaaggtgaggtcgtggcaggcagagacagcagggaagaggcagagctggtttcttccacagaggattgactaggccataacatatcaccagggcttctgctcacaagagtggtcatctctgagtgtgaaaatctctgagtcacagtcgagtgggtttctacccagttgggtgttgttgatatgtccacagtatgagtactctctggtgtagacccaggaggatctgtttgtgtcttgatcatcatttctgctgattctgtcattatgctggaggtagggagtctggtgatggtttctgtggaagtctctggtgacactgtgagctgagcaaagcctgagatggatgttctgctagaggaggtgacttctgtcctggagacttcagcagtggcaccagtgggcactccagaaaggacagtgctcatctctgtggctaagctggtcccctcagagctgctggtctttctcagtccaagggtcagggaggatgttggttctgtctgaattctgctagtctcaaaaaagccaggagttgatgtggagacactcgtatcctccatggtggaggtaataaccattggagatgtgactttggatgtctgtgagtcagctaggacaaaggaagtggattcatgtccagaactggaggtccccacatcggtcactgttctgtttgaagaaggatgagttttctctgtatctgtggtgacttcagaggtggccagtatttcaactgaggtgctgctcaaatttgcaggtgagttggttacaggttctgagcttttgtgcaacatatctgtagtttttgccaagccagacgtgaggagtgaagtcacaggaagaggagaggaagagatgctctctggtaatgtggaggaaacaggagaaggtgaagttgtggctggtgaagacatcagagaaaaggaaggtctagttttttccagaaggggagggctcatccatgatacatcctcaggacccctcctcataagagtgctcatctgtgagtgtgaaaatccttgagatatagttgagtgtgtcattgtcaaagaggttgtgcttgacgtgtccaaagtactggtgccttgtgttgtggcccctaaaggacttgtatgggtgttcatggttatttctgctgattctgtcatgacaggggatgtagagaaccagctgacggttcttgtggagatgtctggtgatattgtggattgagcgggacctgggatggaggtgacgtcttccttggagatctcagtagtagcaccagtgggcactttagagaggacagtgctcatcttggtgcctgagctggtcccttcagagccgctggactccctcaatccaggggtcagggaggaagctagctctgtctgaatcctcctagtctcaaggaaggcaggagttgatgtgagaacacttgtatcccccatggtggaggtggtacacattggagatgagtcagctaggacagaggactgtgatttatatccagagctggtggttgccacattggtccctcctgtgtttgtggaaggatgcacggcttctgtatgtgcagtgtctttgtaagtggtcagtctctcatgggaggtggtgctcaaacttgaagatgaactggttccaggttctgtgcttgtacccaagatatctgtggttgtcgccgggccagaggtgagaagtgaagtcacaggaaggggagagggggggatatgtgctaggaatgtggtggaaacaggatgaggtgaggtcacggcaggtaaagacagcggggaggatggagggctggtttctttcacaaagggagggctaggccatgacacacctccaggacctctgcccatggaagtggtcatctctgggtgtggaaatccctgaattactatagagtgggtttccacccaagagggtgtggttgctgtgttcaaattaagggtactttctagtgtagactccgaaggacctgtttgggttgtgatggtcatttttgcagattctgtcaggacagaggaggcagaaatcctggggatggttcctatggagatgtcttgtgacattgtggactgctcagggcctgacatggatgttctgctaaaggagatggcttctgtcctggagacctcagtagtagcaccagtggacactttagaaagaacagtgtttgcttctgtggctaagctggtctcttcagaggtgctggtctccctcaatctggtggtcagtgaggaagctggctctgactgaattttcctagtgttagataaggcaggagttaatgtagaaacacttgtatcccccataatggagatggtacccattgccgatgtggctttggttgtctctgagtcaggtaggacagaggaaggggattcatgtccagaactggaagttccaactttggttactgccgtgtttgagaaaggatgaattttctccgtatctgtggtgacttcagaggtggccagtatttcaactgaggtgctgctcaaacttggaggtgaactggtttcaggttctgcacttgcgtccaacacctcagtagtcttcacttggcctggtgtgagaagtgaagtcacagaagcagaagaggagtggctacttgctggtaatgtggaagaaacaggagaaggtgagatcatggcagataaagacagctgggaagatggagggcttgtttcttccacagggagagagctgggccgtggcacatccccagcacctctactcacaagagtggttatctctgagtgtggcaatctctgagtcatagtcgaatgggttattaccaaggagggagtggttgatgtgtctaatgtaaaggtactctctgatgtagacccaggaggacttgtttgggtcttgatggtcatttctgatgattctgccaggatgggggaagtagggaacttaatgatttttcttgtggtggatatttctggcaacattgtggactcagcagaaccagagatggatgttctgctagaggaggtgacttctgtcctggagatctcagtagtagcaccaatggacacttcagaaaggacagcacttgtctctatggctgagcttgtctccacagaactgcctgtctccctcaatttagggctcagggaggaaattgactctttctgaattctgctagtctccaagaagtgaggggttgatatggcaacagttgtatcctcctgggtggaggtaataaacattggtgatgtggctttggatgtctctgagtcagctaaggcagaggaaggggattcatgtccagagctgggaatctccacattggacgctgctgtgtttgtggaaggatgcacagcttctgtatttgtggtgtccttgccagtggtcagtctctcatctgaagtgtggctcagctttggaggtgaactggttacaagttctgggcttgtgtgtaacatgtctgtggtcgttaccgggctagaggtgagaagtgaagtcacaggaagaggagaggaggagatagtcactggtaatgtggaggaaatgggaggaggtgaggttgtggcaggtaaagacagcagggaagggagagagctgggattttccagagagggagagctttgccatgacatatctccaggacctctgctcatgagagtggtcatctctgagtgtggaaatctctgagtcaaagttgaatgagtctttgcctgggactttgtggtggatgtgtccaaggtaagggtatcctgtgaggtagacccagaaggacctgtttgagtggggatggtcatttctgctgattctgtcatggtgggcgaggcaaagagccttgtcattgttcttgtggatatttctggcaaaactgtggactgagaagggccagggatggatgttctaccagaggaggtgacttctgtcctggagacctcagcagtagtaccagtggggacttctgaaagaacaatacttgtgtcagtggaaaagctggcattttgggaaatgctggtctctctcagtccaggagtcaaggaatatgttgactctctcttaatttttgtagtctcagaggaaacagacattgatgtggaaacagttgtatgccccatggtggaggtggtatccattggagctgtggccttggttttttctgagtcagctaggacagaggattgtgacccatgtccagaactggtggtttccacattagtcgctgctgtgcttgtggaaggatgcatggcttctatagctgtggtgtcttcatctgttgtcagtatctcatgtgaggtactgctcaaatttggaggtgaactggttgtaggttctgggcttgtgcccaatgtgtctgtggtcatcactaggctaggggtgagcagtgaggtcataggagaaggagtggtgtgaatggtctttggtaatgttgaggaaacaggaggtgaagtcatggctggtgaaggcatcagggaagaggagaagctggttttctctatagaaggagggattgtccatgatagaatctcagggtccttgttcatgacagtggtcatttctgagtgtggaaattcctgagtcgccatcgagtgtgttcctgccctggaggatgtagttggtgtgtccaaggtaaatgtgccctgtgatgtagagccaagaggaggacctgttcgagtgatgatggtcatatttgaagattctgtaatgccaagggagataggcaggctggggatcacttcagtggagatgtctggtgactctgtggaatgatcagggcctggaatggatgttcttctagaagaggcaacttctgtcctagaggtctcagtagcaccagtggtcaacttgtgaaggacagcacttttctctgtggatacgatggggtcctgggaggtgctggttcccttcagcccatgagccagggagaatgttgactccatctcaatccttgtaatctcagaggagccaggcatggatgtggaaacaatggtgtcccttatgttgaaagaggtaaccattggagaggtgactttgggtggttctgagtaggctgggacagacgaataagattccttttcagaagtggtggtccccacattggttactgctatgtttgtggaaggatacattttctctgtatctttaatgtcttctgaagtagtcggtatcttatgtgaggtgctgcccaagtttggaggtaaactggccacagatgccagcatatctgtggtcttcactaggccagaggtggggagtgaagtcagatgaacaggagaagacggcctactttctggtaatgtagtaggtacaggggacggtgaggttattgctggtaaagacagaagggaagaggaagagctggttttttccacagagggtgggcttgtccctgatatgtactcaggaactctactcgtaagagtggacaaatctaattgtgaaaatccatgagtcatagctgagtgggtccctgcctgtgaggttgtgattgatgtgtcccaggtaagggtaccctgtgatgtcgccctatgaggacctgtttgggtggcaatggtcctttcttcggattttgtcaggccagcaaaagtagaaagcatggtgacagatcttgtggaggtgtccggtgacattgtgggcttttcagtgccttggatggatgttctgctagaggaggtgagttctgttctggagacctcagtagtagcagcagtgaatgctttgtcaaagaccgtgcttgtgtctgaggatgagccaattttctgggaggtgctagtctccctcagtctaaatatcagggagaaagttgtctcagactcaatctttttcatcgcagaggatctaggcattgatgtggaaactattgagtcccccgaggtggaagtgataactactgcggatgtggctttatatgggtctgagtcaggtgagacagtaaaatagaattcatttggtgaactggtggtccccacattggccactgctgtgtttatagaaggatgcattgtgtgtgtatctgtggtggcttctgaagtggccaaggtgttccttaaattttgaggtgaacgagtcacaggttctaagtttgtgtccatgtctgtgatcttcgccagtgtaggggtgggtactgaggtcacagaaacaagagaggaggtactgtgctcttgcaatgtggaagttacaggagaaggtgaggttgtcacaaggagaggtgcctgagaagagagagagttggcttcttctgcagagaaagggcttgtcttcaacacatcattgagatcattgttcatgacactggttgtttctgaatctacaaaatcctgagttctggctgatggagttcctgctgaggtggctatggttgatgtgtccagggtcagttggccaagagatgtcaccccagaaggacctgtttgtgtggcgatggtcttgtgtgtagatattgtcaagggaggagagttagaatgactgctgctggcttcaggtgaaatgtctggggactttgttgactgagcagaagctggcatgaatgtaggatcatagtaggtgacttctgccctggagacctcagtagcagcatccagggacacactggagaaaacagtgtttgactctgtagttgagttcatcaccagggcggtgctgtcctctttcagttcaggagtcagaggggatgttgagtctctgtcaacatttttagtctcaggagaaccaggtgttgatgtggaaacaatagcgtcctccatcatagatccagtaacctttggaggtgtgtgtccggatggctgggagtggattgagacagaggaatgtagtttatgcatagaattggtggtccccatattggtttctgctgtgttctctgaaaagtgaattgtctctgtatttgtggaggcttcagaagtgagtatctcacctgagaagctacttgcacttggtaaggagctggtcacaagttctgagtgtgtgtccaacatgtctatggtcttcctcctgccagaggtgagaagggaagtcacagggagagcagaagtggggctacttcctgatactgcggaataaagagatgaatgtgaggttattgcaggtaaaggcactggggaagaaggagaactggtttcttccacagagggagggctttgccatgacacgcccttagtacttctgctcatagtagtggtctcctctgagtgtggaaatctctgagtcacaggtgagtgagtcccttcccaggaagctgtgcttgatgtgtccagggtaagggtagcctgtgagatagtccctataggacctgtttggttggtgatggccatttctgtggatcctgttacaaaaggaaaagtggagagcctggtgatggtttctgtggagatgtagggtgacattttggaatgatcaggccctgagatggttgttctgctggaagtgataacttctgtcctggagacctcagtagtagtagtagtgggcacttctgaaaggacagtgctggtctctgtcacagtgttgatctcctcagacgtcctggtgtcccttaatccaggaatcaaagaggatgttgattcagtctgaattctagtctcaaagaaggcaggagttgatgtagaaacacttgtatcccccatggcgaaggtgatacccattggagatgtggctttggatgtgtgtgaatcagctgggacagaagattgtgattcatgtccagaaatggaggtccccacgttggccactgcagtgtttgtatgcatggaagcatgcatggcttctgtgtgcgcagtgtctttgtaagtggtcagtctctcctgtgtggggctgcttaaatttggaggtgaactcgttacgggctctgggcttgttgtgcccaatacatttgtggttgtcaccagaacagaagtaagaagtgcagtcacagggagaggagaggaggggatgctctctggtgatgtggaggaaacaggagaaggggatgtcatggaaggtgacatcagggaaaacccagagctggtttcttccacagggggagttgtcatccatgacacatctccaggggttctgctccgaagagtggttatctctgagtgtgggaatccctgagacacggttgaatgagtccctccctggaaaagtgtggttgatgtgtcccagggaaggataccctgtgatgtagccccaggagtagttgtttgagtggtgacggtcatttctgcagattttgtcatgatgggggaggtgaagagcctggtgatcattcctgtggagatgtcgggtgctattgtgggccgatcaaggtctgagatggatgttctgctagaggagatttctgttctggaggcctgagtaatagcacctgtgggcacataagaaaaggcagtatttgtctctgttgttgagctggtcttctcagacgtgctgctctccctcagtctagggctcagggatgctgttggctctgtttgaatttggttagtctgagagatattaggagttgatgtggaaacacttgtgtcccccagggtggaggtggtactcatcagaggtgtggctttcgatgtctctgagtcagctaggacagaggattgtgatttatgtccagacccggaagtccctacattggtcactgcggtgtttgtggaatgatgcatggcggcttctgtgtgtgcagtgtctttgtaagtggccggtctctcatgagtgatgctgctcaaatttggaggtgaactggttacagactctgggcttgttgtgcccaacacatctgtggttgtcaccagaacagaagtaggaagtgcagtcacaggaagaggagaggaggggatgctctgtggtgatgtggaggaaacaggagaaggggatgtcatggcaggtgaagacatcagggaagacacagagctggtttcttccacagggggagttgtcatccatgacacattcccaggacccatgcccatgagagtggtcacctctgagtatgggaatccctgagtcacagttgaatgagtccctccctgggaaagtgtggttgatgtgtccaagggaagggtactgtgcgatgcagactcaggaggacttgcttgggtggtgatcgtcatttctgcagattttgtcttaatagaggaggtgaagaccctggggatctctcctgtgaaggtgtcaggtggcactgtggacttatcatggtctggggtggaaattttgctagaagagttgacccctgtactggagacctcagtaatagtaccagtggggactttggaaagtagaaaacttgtgtccgtgggaaagctggactcctgagaggtactggtctctctcagtctaggagtcaagaaatatgttggctctctcttaatgtttgtagtctcagaggaaccatgcactggcattgatgtggaaggagctggatctcccacagtggtggtgataaccatttgagttgtggctttgggtgtctctgagtcagccagtgcaggggaatgggattcatgtccagagttgttggctttcacattggtctcttctgtgtttatagaaggaaaaatttcctttgtgtctttactgtctttagaagtggccagtatcttatctgaggtgctgctgaaatttggaagtgagctggtcacaggttccaagcgtgtacgtaatatgtctgtaatcttcactaggccagaggtgagaagtgaagtcataggagaggagagcttatcctctggtaaggtagaagaaatcagggaaggtgtggtcattgcaggtgaggacagaaaggaagagggggagctggttttatccacagagggaggacttgtccatgatacatcctgtggaattctgctcataagagtggtcacatccaattgtgaaaatccatgagtcatagctgagtggatccctgcctggggggttgtatttgatgggtccatggtaaaagtatcctgtgatgtagccccatgaggacctgtttgggtggtgatggttatttctgcagattctgtcattattggggaggtagacagcctggtgttggtttctgtggagatgtctagtgacactgtggactgatcagggccagggaaggatgtactgctagaggaagtgacatctgtcctggatacctcggtagtggcaccagtgagctctttgtaaggaacagtgcttgtctctgtggacgaggtgatctcctgggagatgctggtctccctcagtttaggagtcagggaggaagttgtctcagtctcagttcttgtagtcttagaggatttaggtattgatctggaaattgtggtgtcttccatggtggaggtggtaacatttggagatgtgactttagatggctctgggtaagctgagacagtagaatgtgattcaaatgctgaaccggtggtccccacattggtaactactgtgtttatggaaggatgcgttgtctctatatctgtggtggctgctgaagtgaccgatatgtcatccaaagtgttgctcatactttgaggtgaactggtcactgtttctaagcttgtatccaccttgcctgcggtctttaccagtgaagaagtaagaactgaggacatagaaacaggagaggaggtactgtgccattgcggtgtgaaagcaacagaagaaggtaaggttgtgacaaggacaggtgcttgagaagagggagagctggcttcatcctgaaagggagggtttgtctgtgacacgtccttgacatcattgttcattgcagtggttatttttgagtgggcaaacccctcagtcaccactgatggagtccctgctgaggtttccaaggttgatgtgtctaaggcaagtggaatctttgatgtagctccagaagaccctgtctgggtggtggtcatgtgggtagatattgtcatgggaggagagtttgaaagtctactgctggctactgagaaaatatctgggaactttgttgactgagcaggagttggtatgaatgttgcatcaaaagaggggacttccatttttgtggcttcagtaatagcccccacagacacattggagaggatgatgtttgactctgtagttgagttcatctcctggagggtgctgttctcttttcgtccagcagtcagggaggatgttggctctccctcaatgtctgtggtctcagaaccaggtattgatatagaagcaagagcgtcccccatgctggaggcaggaaccattggagatgtggctgtagatggttctgagctgactgggagagtggaatgcagtacatgtgctgaactggcagtccccatattggtcactgctttgtttatggaaggatgaatagtctctatatctgtggtggctgccaaagtggccagtatctcatttgatggattgttcaaattttgaggtgaattggtcacaggttccatgcttgtgttcaacatatctgtggtcttcaccagtccagaggtaagaactgaagtcgcagaaacaggagaggatgtatgttgcccttgtaacgtggaagtggcaggaggtatggttgtgaccaagaaaggtgtcagggaagagggatagctggtttctgccacagagggagggcttgtccaggacacatccttgggacctttgcttatgagagtggtcttctctgattgcataaaatctggagtcacagctaatggagtctctgtcaagtaaggcatggttgatgtgtccaagagatatggaccctgtgttgcagctccagtaggacctgtttgggtggtgatggtcactcctgaagattctgtcattatcagagaggtggaggggttggtgctcacatctgtaaatgtgttggtagaagttataaactgatgagggcttgagatggatgttccgctagagaaagtggcttgtgtcttggtgacatgagtagtagcatcaccactagacacatgggtaatgacagtgcttgtctctgtagcagagctggccacctgggatgtgcttctctcctgaagtccctggttcacagaggacactgtctcaatctctgtggtctcggaggagccaaatactgatgtggaagaagtgatgtcccccatgatgtgggaggtaaccaatggagatgtggctttggatggctttgtatggcctgggataggagaatattcagaactggttgcctccatattcgtcactgctgtgtctgcagaatgatgaattgcctttgtatctctggaggcttcataagtggataacgcctcacctgctgtactgctcaaattgggaggtaaacttgtgccaggttccaagcttatcctcgacatgtctgtggtcttccccaggccagaggtctcagacaagaaaactgaggtcacaggtggagtagaggagggactgtgcccttgtgatgtcaacaaaatattggaaggcgaggttgtagcatggataggtaccagggaagaggaagagctggtttcttccacagagggagggcttggctgtgatgtatcctcaggacctttgctaaagagagtggtcttctctgagtatgtaaatctctgagtcgtagccagtggagtccctgtccaggaggctgtggctgatgtatccaaagtaggtgcacttagtgatgtagcgccaggtggacttgtttgcatagcaaggatcattcctccagattctgtcatggcaggaaagttagacagcctggtgatggcttctgaggggctgtctgacgacctcatagactgggcaaggaatgagctggatattctcttagaggaggtaatttctgttctaggccccttggtgatcgcagtggaacctggggaagagataatacttgtttgtgtggttgagctggtgtccatgtaagggctgacgtccctcagttcaatagtcaagaaggaattaggctctgttctagcccttgtagactctggccatgtggttgttgacatagaaactattgcttgttccctggtggaggttgtaaccactggagatgtgagtttggatgacgctgagtgggctgggatagtggaatgagaagcatgttcggaacttgtgacccagcctgtggtctctactgtgtttgtagaagggtgaattgcctctttgtctgtggtggactcagaaggggcaattctctcatatgggctgcttttccaacttggggatgaagtcgtcccagattccaagtttatgtccagcgtattcagggtccttaatacactggaggagctggtaacctccttgatggtatcttctgagacagaattcatcatctcagtgatccaaggtgcacttggggttgatttttctttctcattccaggagtcagatgtagctcttgcctctgttgtaagagctgtctgcccttgtctctgaaaagttgcatctggagtttttgctgtgtgtgggatcacatccagagttgttgctgctgatctgggcacctgccctggatgtgcagaagtggtggtgggaagctgagtggaagtctgctctgcctttttgcttgtgggatctggtcttgaaaaagtaactccagagctccttgccattgcagctggtgtgactgcacttgtaatgtgccctatagagaagggcaactgtgaggtagctgggctgatcatggtttccaaagtgagttcctggggagttgtggccccctgaggagctgaggtagtggctgtggctgatgacagagatctcccagtgtcccagtcaagagtggacagagaatcaaacagaaaagtggacaggggcgtatttgggtcagtctttgtactagcatgatctgtagaaaccattgaaacaggcacatcttctgcttctgtactactgggagtccaacttgtacttaaaatgtcaggaactgagatgctcatcctctggacacgagaaaaagttgagatgggagtagatgcagttgtgtctgaaggactcaatgttctttcacttgtactggtctctgtctttacagctgaagcatcagaggatggagtgaccaggctggttccaatgacagttatacggccatggggagtagacatggagtctaattcagtgcttgaggctaagaatgaagttgtatgcattgtggaaattgttccaggagatcttgcaactttcaagtttgaagtcatgtctgtgacagtccaggaatctgatgcagctgtggaagaccaggtggaagggtgttctgtagaagttgtgcgcctctctgtggccggggtgctgtccatggtactcatacccacttctgggttgggtgtggtagttgagattgagttggttcccatggtggtgatggtggtggagatacctggagtaggagctgtggttacgtccaggatgctcacttccgcaggagatgaagtctgagatagatgcccagcagtaggggcaatgtcacttttcactgcacttacattggccctcagagtctcaagccctattgaaggagatgtgacagatgacgcagagcttgtttttcctcctgagggattggtgaggcttgtaatgccttggtctccagagggcagagacactagtgaggtggtttgtgctgtggaggtgatgtataatgtgtttgtgacatcaggagatgcaccaagggtgatgtcactcccagatgtctgatctgaccaagaactagttgatgaataagcctcatccacagatcgacttgtctgttgttcagctgccattatcttattattcaggacagtggagggaatggctgtggtgcttacccatgtctcggttttatgtttggatttatctgtcaatgagctcacagagtttgggctggttacagggtcttcaaggatattggaagatgtgctcagagagacatgtgtgtcccctgtggtccctccagtagagccatgccacatagagaattccattccagttgtctttgaaaccagttctggactgctttgctgaccagtccctgtgatgcttctagcagttggtgactctagggagacagaggacattgtggccagtgactgcctggtccctcctggagttccagaataaaggttggtccaagcctcaggtggggatggggagagggagaccctttctgtagccaacatattttctgttggtgacttggttggtgatgtggttcctgtgggcaggtgagagatgctggtgctgccacttcctagggctgtggactgaagggtgactggttccactgtggtctccatgggaacagttgtttctggagtcttccaaggagaatttctcacagtggacctgatctctgggctgatgctgggttccttggagctcatgattttgagagtggtagacatttctgggcttcctggggatgtgcctgtgattagaaagtaagtcagtggagtatatgcaaatggtacagaagatgaagttttttggtttgacactatcattcatttcctcccgggatttcaattaaaactatttcctccttctctgggaaagaaaatgttgagcttttaattctcacactttaagcctctggacaccagggaacacattaaacattccaagggagatggtgaagttagagctttgaccatctggcttgctcaggagaaattatcacctttagctcagtttttccccatgccccatataaaagggctctttgcataagggaggatgtgatgaaccaggacttcacccatgcaagaggctacccccaaactatttccacttttgtctttggagcttgcccttgccaaaccaatttcagcttccaactttcagcctcctctaggttcccccaaatcttagttcactgcaaagctacttaaggatttgagaagaaagaggataagggagatgagctcattctttctcgtcaccttcattttctttcaaattcattcctccctctgaatcctttccctgtccttcaggaaaataacatctacctgtcaaaggagtgagaaaaatgtgacatcccaagagcactcctagggaccatatttcacatttttctaagcaatttggcactgccaaggacttcagcccataatcccttcttccgtagtaacaaacgcaacatttgccatctcaggttcacctaggccctccctgtgaacacagtgatggtctctgatttagaaagatccttcactctggagcagaagaaagtacagaaagaatcgactctgtagcattctctcctgctgaattaattggctattgatcatgtaaattagtaagttgaagcaacagaagtgttcaattagtaacatctattggggaaaaatgatcaatatcctcagagaagagtgtcaagaagtcaaaggaactttttttttttttagatggagtcttgctctgtcacccaggctggagagcaatggcgtgatctcggctcactgcaacctccgcctcccaggttcaagtgattctccttcctcagcctcccaagtagctgggattacaggtgtgtgccactatgcccagctaattttttgtatttttagtagagacagggtttcactatgttggccaggctggtctcaaactcctgacctcgtgatccgcccaccttagcctcccaaagtgctgggattacgggcgtaagccaccacacccagcctaggaacctattttaaaacctagtccttgctgggtgtggtggctcaagcctgtaatcccagtgcttagggaggccgaggtaggtgaatcacttgagtccaggagtttgagaccagcccaagcaatatagtgagaactatctctacaaaaaatttaagaaatacacacacaattaaccaggctaattggtgatgatcacctgcagttctagctgttgggggaggctgaagttggaggattgcttgagactgaggaggctgaggctgcagtgaaccatgaacacgccattgcactccagcctgggcaacagagggagaccctgtttcaaaaaaaaaatgcggtctaggctgggcacagtggctcacacctgtaatccctgcactttgggaggctgaggtgggaggatctcttggagccaggagtttaagaccaccttgggccacatagtgagaccccatctgtacaaaaaaaaaaatttaaaaaaacaacaacaataagctgggcatagcacagaggctctagagcccagtgagtgagctggactgctgcccagctactcaggaggctgaggtgagaggatagcttgagcccaggaatttgaggctgcagtgagtacagtgagtactgcagtaaatatacaccactgtactccagcctgggtgacagaatgagaccatgtctcaaaaataaatgaaagagagagagagagaaagaagagaagagaaggagaggagagagaaagagagagagagagagagagaagagaaggagaggagagaaagagaggaagagagaaagagagaaagaaaggaaaagttgctagcatttacttataaaataatgaaactgaagccttgtatattttttcttcccagaatcaataagcagcacttttagtcagcagcaagctgtcctcccaccttggcctctcgagtagcagggactacaggcctgcacgatgcccaacttattttttttaaaaaaaatttttttatagaggtggggtctcactatctggtccaaattggccttaaggcttgggtgaaaaaaattaagtaaaaaaataaaaaatttaaaaagaacaagagaaagaaagaaagagagagagagaaagaagaaagaaagagaaagaaagaaagaaagaaagaaagaaagaaagagaaagaaagaaagaaagaaagaaagaaagaaagaaagaaagaaagaaagaaagggagagaaagaaaagaaaagaaaagaaaagaaaagaaaagaaaagaaaagaaaagaaaagaaaggcttgggtggcattagcagagcagaaatggaaacaaggtctatatttacctgctggactgctccccgtctcctctgctggggcaggccacgtggaatttccttgtgctgcctggcttgacatctttatggtggtcactagcgttccatcagttgctgaaagaaaagggcaataggaaggtttagctatccattacttcagaatgtcagtttttgagctttctttacattgactgatctttctattttgcttcaactcagaggctctagagcccagtgagtgagctggacagctgcccaggtgacctcccatcaaacactagtctaacaggacatggtagaaagcagacaccaggcaccgtcaccagaaagactgacagatctcagatgggaaggggttcattttataagtaatcacaaattaaaatgtgacaagtggccaggcacagtggcttgcccctgtaatctcaacactttgggaggtcaaagtgggaggattgcctgagcccaggagtttgagaccagcctgggtaggatagtgagacaccatctctacaaaataatttttaaaactagctgggcatggtgatgtgcacctgtagtcccagctcctctggaggatgaagcaggagaattgcttgtgcccaagagttcagggttgcaatgagctatgatcactccactgtactccagcctggatgacagagtgagactgtctctttaaaaataaatgaaataaaatggagtaatattctgtttagagcatggattcttaacctctttttattataggtccctttgacaggcttgtgaaccatatgaattcctttataaattaaaataaaaatatagaataaaacataaaataacaatataaaatattagattacaaaggaaatcattgtggataaagaaaatctggtacacatacacctcggagtactatgcagccataaaaaagaatgaaatcatgttctttaaagcaacgtggctggagctgaaggccatcaacctaagcaaaataactcaaaaacagaaaattaaatactgcacattctcacttataagtgggagctaaccaatgggtacatgtggacataaagatagaaataatagacactgggactccaaaatagaggaggctgggagtgaagtgaggattgaaaaactacttattgggcacaacattcactatttggctgatgggttcactagaagccaaacctcatcattatgcagtatatccacgtaacaaacctgcacatatacccctgaatctaaaatttaaaaaacaaaggaaatgattatattgaaatgttgttatcaagatcttaataaacaaatgtaatacaataatacaggcacttattttactaactcattaaataagatctattgaaaagcctaataaccactataattatgaataaagtcgtacatgatttttaaaagtgcttgcaacaattgtcataggatatgaaagtgtccggaatttctgttgttggcaaaggcacaggcactgctaggattaatgtggtttgttttgttacctctattcatcaataaaacaaatgctaaatttcagttcgaggttagcaaaaataaagatgtagtttacaaataccgcatgttctcactcataagtgggaattaaaccttgagtacacatggagacatgtgaattgagggtggaggctgggaggagggagaggattaaaaaaaatctactgatcaggtactaggcttattacctggctgatgatgtaatctgtaccccaagcccccatgacatgcaatttacctatataacaaacctgcacatgttccctgaacctaaaatatttatattttcaaatataaaagtttaaaaaataaaaaagatgtagtttatttccagattcatccccagcacacttggggaaggagcagggcattcttactttcaaccaaggaggtcttggcaggaactgaaatagagcttgcccatgtttctggagaactctttcttctggctgtgggttctgtgggagaagagacaggtaacaaggatgttggggtctcagatggtgtgaaggttaacgtctgtgtttcagctgttgttccctcttcttctgcaatggtctggcttgaggttaactcaggaggctcctcctgggacatatttagagtggatgttggagaaagtgtcagagctgaagtctgaagatgcaccaatatgttgggctgccttgccatggaaggcccaagaaatagtgaagtctttctggaggtggatgcagtgggggaaaggaagcttgtttctttctcagtggataggcttatgggagaggaactagaaccagaccttgctgcttgacctgtgctgaagagagttgtgagttttgatgcaagagaggtcgatgtcatagctgatgatgccttgcttgggtctggataagacatgctctctgaggcatatctagggtcccctgttcctgaagtggggactctgggttcatgccctgccatagaaggggaggcagatccctcaggggtttcagtaaaacctgttgattgaaatgagcttgcacttatggcctttgtggaagtcatcatccttgcccttgggtttttttctggagacttggacagtgaggaagatgctgtgcttgcatctgagtctggaatggtgttcagggactgtccaggagttggtaaagaagcggacttagtatccaaacttgggacctcagaaaactcaaatgtcaaggtagactgtgggatcccccaagttgggggagctgtagtcagtgaggcaaaggcctttgatgggcttgaggaggcagagacaggtgttaggaggcctgactcagcactggtgggcttcacaggtatccctttgggtgctgttgattgagtagctgtcagtctgttcgtggtgatttcagacatggctgtaacctcacctgggttcatggtcagagggagagaagaaaatgttttggttccagttgagtgagtggacccacttctgattcctccagagctagccataccctggcttcctgtggttagtggcatcacagatgccctctcaagcccagctgatgagtctaccaaagccgttgtctctgagttttcagaactctgactgaatacaagggaaccagtagttcccgcaggcaaagtagaaagtgccactgtgatcgaaccttcataggttgtattccgtggagcaacaatcttagagggggaagtggaagaaggatggagtggactttctgttactccttggatagtgattccagggatgctcctatctgggttacttactgtcttaagaaccagtgcatcaccatttgaggtctctgacatggtcagggtagtctctgggactgtgccaagactatccgaagctatagtcaccagtggggtggaatcaaaggatgtagctaatgaacttgttggctcagtggcagtgagagggatggctggagtgtccgggagtaaagtagggaaggaagctccagacagagtccccgtacttggaaatttagaaggtggcgtggacacagttgaaaacaagatggtatctgtgaccaaaatctttgaggtaagtgttgtgtctgaagtctcagtgactaccaaaaggctctcaggagtagctgaagtttcccagtttgctccagaggtgggtgtagttggggtctgtggtgaagaatgaatggctttgctttcactcgtagtgagaagactggcttctgatgtagcactggatccagtgaccactgctgctgagagatggggagtgaaggcagtggctggttcaatagttgatgctagaagtgagtgtgcctctcctgcaggacttgtcttgagaaagcccatggcaggtaagtcagtagtactgcctacactggtccatgtacctggtgctggaacagaagtcaccacagaattgctagaggtaggattttctccggaggcagtgtcagtgctgaccatggtgctgaaagttcttactggtctagaccaggctaatagggccgagcttgtctcgacagggtgggtgattgtaaagggtggtaaagtggatggagtgccacccacattggagcccccatcaagagaataggtgttactggaaacagatggagaggtggctgtatttgtctctgttgtagatgtgggaacctggggtctatctgaagagaagagagatggggaggaacttgctgtcattcctgagatgctagtgggactgatggaggctgttttagtgacatccatagttgaagaagctatggaggtgttgatcagatcagaagaagaactgctatctgaggggagctcatttgttttccgtgcgtcaaggatatctgaggtttttactgtagtttcattatccagtgaaactgtgctggtctctgtgaaactagcagtgagaactatgggggaagtggttggagcagcagaggtgattgtccttctctctcccagtgtaatggagggactggctcctgtgggctttgtagacatagctgaactcatccaatccccaggaataggtgtcactcttgaagtcaactcatgagtgagagatgaaatggttctaaatgaatgagttgtcttttctgggaaatgtgagatagttgtcacttcagtatcaggggagggggaaaaggagacagtgggaatactctcagccccatctgaaggtgtgtcaattacatctgatgctactgtggacaagccaggtggacctgcgctgtttactgggatgcttgtttctgtattagtagttggatgggaccccaaagggattgacactgtccatggatccttgttcattctaaaggaaaccaaagactctgaagtgggcagggatattgtcctagttaatttggtccctgctgaagaggctgtgcctaaactcgggttagcagtactctcagatgtaaggccagaaacatctgatctagaagttatggccattggaagagggacttcagagctgatacttgcccccacaggagtctcagaaagacctgtgaccgaggatgcatcagtgttcaaagtactcgcggctgtattctggggaccatgggtctctgtttctggatttctttgcttagcagcagatgtggatgcagctgaaaagagtggaaattcagtcgtagttgaacttgggtttgaaaccccagaatggcctgaggacagtgcctcagataaactagtacttggccaagttgtagtggggagagatgtagtgaggtcccatagccaggaagtgattgcattcctcctactgattgtggaatccaaggattcaagtgaggctgaggaatatggagaggatgtgctgcttccagaagagactgaattctcatgggtaggggaagcagacactgccacagagttgacatatggagttgactgtgtctgcacagaaactttttctgaagaaactgcatgtagtggttgagtggactgttcaattgtgcctgtactggtccatacaattgttggtggggtgatgggagaatgtgtcatgggtgctgagttgatgtctggtcctgaggttatgcctgtagaaatgacttcttccactggaatggatgaaaaaggcaatgttaagcttatggccctgtttccaggagtggaagtcaaagtggtctctgctccaggagctgaggtctcaggtcggggatggattgaagaagacacttcactcttctctgtgtaagtcatggaagtgtgagtgctgtttcccatagacagggacttagaagaggtatcagagccgttttccaatctggaggctctagtgacaccagtattcaatgacctgtcagtggccaaagtccctgcagagctggtgtgcaccccatggctgaggtcaagtgaatctgtggtattgggggcattactgagagtgagagaaatccatggtgtcacctccattgatggagttggagatggaagatccatagaggcagttctgagtttttcttttcctgtattttcagtgcttcccaaagctgtggacataagggtagctgagctggactctgtccttgctgaagacttggagatgtctgaggtcataactgtggtgacctccttggtccaaaatgtgctgccccctatgaattccacatcaggagttgtaggagatgaggttagagggatgcttgtgctcatctggcttccttcagcatagctgggttcaagagaggaggagagagctgtatttccctgtgtgttcagccttgggctgcttcccttactagaatctgtgactccttcagtagttgactcagaaaggacagaggaaactcttcctaatgactggctgatgcttcttcctggagcactagtaacaaggagtcccattgtcccagccatagagacagtggctgtagaacttcttctttccagtgccatgtttgtggatgtctcagctggggaggatgttcctatgggaaggtgggctatgcccagggtgactccactactactgctccctgttgttgtgttgtccatgggtggagtggattgaatgtttgttgggccagtctcaatctctctggacagtgtgtctgtagatggtttccaaaaagtggttgcctcagaggagcttctcccttgtgtcccgagctcagggtagacttcagtaagatgggaaggggatgctgaggctggtatagatgtttgatctttgagtgactgtgtcacgtgagtaggactcatcgttgcagaaagggtgtcctgtgcttgtgttgagtgttcaatcacactggtccacgtggttgtcagtggggtgataggaacagttgttaagtccccagttctgcccaaactcctgattcctaggtgctgatccaacgttgttgaatctgtatttctaatggcactggtatctgcctctgactttgaaagttcatgagaaggtgtggacataggtggaaaaatagcaaatgtactcatgggtgaacttggacttgaaatatcaaggtctgttgaagccatttcctctgtcaaactggtactcagccatgttgccatggggagagtgattgtggtctgctcactgggagcaaggaccaggggttcccctgggacatcagaagttagttccaatgtgctgcttccaatggtaggggaggtagggattactacagagacaggtcctggagctgactgtgtctcaaatccagatgatttttctgccaattttgtgtaatgtaattgagtggagtgttcagttgtgtctgtgatggtccatgcttttgtggccggactggtgagattgggtgaacttgagattttaggacttccagagtaagcagctggggtggcggactctgtctttggatggttttctgtggttctgagtgtcctcactgagtggggtgtagagacctgagctgaacttgtatccttaggatccgtagtggtgatgtaggtggtggggtcccaggtactaccagtgttagtctctccaggagctgtcatctcaggtgaagacccagaagagtaagccattctggctgttgatacatgaatgtgggtctctattgaggggaaggtgagaggtgtgtaagagccaggttttactactgaagccatggtaagtttgatggtgcttggactttctgaactagcgtgtgctccgaggtggatgctgggtgtgtttgttgattcagggtaggtgctgagggttggaagtcccccttctgatgcctccaatgatgtggctggagatggagtgtccaagggaaccagggtgctttttcctatggcaccacttgttggaatattacttggtgtcaaggaagtcgtggaaggtaagttgggcatgttccaccgactagtttcaactgtgtccattatcatgcttgtggtgactctctgagttgaaaatgtggagctcattgtgactttgggagtaggagaagaaggagatgaggacaagatgccaagccaggtgcttctagcagagccaggatcaggagatggagggtgagttgcagtcatttgtggagtcagagctgagcttgttccatctctaggtattgtaatttctctggatgttaaatgatagacatcatcagaaaatgtgtcaacgaattggcttgtccttcctggagtgcttgagccagcagcatccatggactgagatggagatactgacattgagacactttctttggccatggtaaaatccatagatgtctcagaggaagctgtggttccaatgggcagatggcttgtgtccaatcttccttcagtaatgtagccctttccaattgggatgttggtagaagccacagccatagagcctgggccattcgtggtctctgttgtgaggatggttgttgatggttccctgatagaagttgcttccatggaactagttgctggagaagtgaatttagagaccattacagtagcagagagagaagtggcagaggttgaaacagtggttgttgctgaaggtaaccctgtcttgaatctgggactagtctctggccaagttgtgctttggggtgcagcagagtcattaaacgtgtctctattggtctgtgacattgttgccgtcccagtgaggtgagatattttaggaagagctgaaccagttgagtttgtaactgaggtactgctcgtagctctgagctcactcactaggtgggatgaagagaactgagctgaacgtgtaggccaggtgtccatggtggggaatactggggtagggacagaggtgctggccaaggtggtccttactctggaaacagaagtctcaggttgagacacagatggattcgaagtttcctctgtttcttctccactagtaaatagatgagtggaaggagtagatgaagaaaatgtggttttgactccagagacacttgggaggctgagagtgctaggactctctgacgattctgaagtcagtgtcccagttgggtggatgttaggtgagtctgtagtctcagcagaggtgctgagagtgaggacactccctgctgtctcttcccctgatggagatggatgagtcagaggggaagttgcatttctgactctttcaggacttgttgctgcattgcttagggtcatggaggaaagaacggctgagctgggctttgtctttgttgagatttcaggagtccctgtggtaatagatgaggtggctttgtggtgtgagaatgtgctggtcgctgacactttatcctcaagaactgaagcagatgacaacagaggaatgctggtgcttatcttggtgtgtcctgcagagtctggttcaggggaagagaagggatgtctagtgtttaatggagtcagtcccaggctggttccttccctgaaagctgaggactgtagagatgatgtctcagggatgacagaagaaaccattgtatatgatggctttgtccctcctggaggacttgagccagcagccgtcttgctcactgctggagacacggagactgggacaccgttcgtggccagagtcaaatctgcggatgtctcagatgatgctgtggctctggtgagtaggtgggttgtgccctggcttcccctggtgctgctgcctcctgtcattgaaatcccagtgggaacagcaaactgatgggtggttgggccagctgtggattctccgatgagtgtgtctgcagatgtttcttcaagccaaatcccttttgtggagctggtcttcagggtggtgaagccagagaccactgagggaacagaagtggtgataggggctgccacactggttgatgctgggggtctctctgttttcatgctaggacttgtctccacccactgtgtgtgctggggttcactaaattgctgagctgtgctttcactggtccatgatgatgcttttgaggtgctggaagtggttgccctcaggatgtcagagctcccgtgggcagctgtgctggaactctgcctcccagaggtgctgcctgtggttctgagctctcttgttgggtgggatgaagagacctgagatggacttctgatcttgctgtcaagagttgtaaaacctagagtggggaccaaggtggcagtcatttcggactcttctccaggagcagaggtctcaagtggagtcatagatgtattcaaagttccttctgtttcctttccactcgtggagtgatgggtgttggtctcctctgagactaaagtggtagatggagatgtggttgtcagcgctgaagtgctggtgccaccaagggtacctggacttcccaaccattctgaagccaaagtcttggctatgtgggtgctgggtatatccatggtctcagcgaaggcatggaaggtaaggatagtctctgctgtctgctttgtggatattgatggagtccccagagaggaaattgtgcttctgaccctttcggcacttgtttctgcattgcttagtgtcatggaaaaagggatagctgagttgggcattgtgctggctctggcctcgggcaccccaggagacagaggggaggtgagactctggcctgagaatatgctggtctctgatattttattatcgagaactgaagcagatgatgacaaaggcgcactggtacttattctgctgtgtcctgcagagccaggttcaggagaggagaagggatatccagtggttgatagaatcagttccaggcttgtttcacctctggaatttggggtccctttaggtgataggtcaaggaaggaagaataaagtgtcccaaatgatgggtttgtccttcctggagtatgtgagtcagtaactgtggtctcagctggagtcatagacactggggcattttccttggatgcagttgaatctgcaaatgttttcattggagatgtgatttttacaggaatatatcttgtgtcccagggggtctctgtgctgtcaccttcagttgttgaggtctcagtggggactgtgtacttctcagtgactgggccacttgtggtctctacagtgagtgtgtatgtagatgcttctttggtaaaatttccttctgtggaactggtcctggtccttggggaactcaatcctgaaaccatgcttgtagcagggtagttcctagagggagttccattgacctggggactcagcgatgggctggttctttgctcggagtgtgtcattcctctagaggttgactcagggagagcagaggacatcacccccaaagactgggtggttcttcccacaaccgaagatgtaggactggccaaggtcttatctggggaagtaaagggcagagtatgttctgtcaccacgattgcacctgtagatgtcttaggtgacaaggtggctcctgtcagtcctgaatccatttctggtgtggctttagtgctcctgctccctgtcatcaaggagcgggtgggagaagatgacccaggaaggcctgagggtttcagcatggacaggtcaacatttgcctctggatggaggtctaagaagaatcccctcagagagggtggcctctgcagagcttctgagctccctgaaactccaaaatttctcagggtgggagatatggctggggtccccgcatttgacctgggaaaacctgtgtctagaagagctgccgtatgtatggaggttgggggaattgtgcaacgcttctaattgagaagaccaaatctcagggagagaaaggaaaggatagttcaaccacagacaatttcctcaaataaacacctgatgatctcaattcttcccttcaaactttttaacggattctcagtgtctgcagaatagaatttcttagtgtatcatgtcttaatgatcctctctctctctctctctctgagtgtgtgagtgtgtgtgtgtgtgtgtgtgtgtgtgtgtgatgtcttagaaaccaggaaccaggctgggcacggtggctcatgcctgtaatcccagcactttgggaggtgaggtgggaggatcacctgaggttgggagtttgagatcagcctgaccaacatggagaaaccccgtctctactaaaaatacaaaattatttttaattttttaaaaataattttaaaaaaaattttaataaaaataaatattgggtgtggtggcatgtgtctgtaatcccagctacttaggaggctgaggcaggagaatcacttgaccctaggaggcagatgttgcagtaagccaaggtcacaccactgcactccagcatgggtaataagagctctgtctcaaaaagaaagagaaagaaagaaaagaaaggaaggaaggaaggaaggaaggaaggaaggaaggaaggaagaaagaaagaaagaaagaaagaaagaaagaaagaaagaaagaaagaaagaaaggaaggaaggaaggaaggaaggaaggaagggagggagagaaagagaaagaaggaaggaaggaaggaaaaaaagaaagaaagagaaagaaagagaaaggaaggaaggagggagggagggaaggaagagagaaagaaagaaagaaggaaagaaagaaagagagaaagagagagggagggagggaggaagggaggaaggaagaaagaaaaggaaagaaagagaggaccgagggagtgaggaagggaggaagggaaagaaagaaaaaaagaaagaaagatgcagatagagcccctacctacacccccatgagatggagctaatgctcagtgtgtgatactggcagatactaaggctcttgaattgagaagtggaggtcagagaagacacggcacttctgttcagatcagagcaggggcccacagatgcactctcaggaatcagtggaagttgctcttgattaaaatctcatgaccctggcctgctgggcgtggtgtctcatgcctgtaatcccagcattttgggaggctgaggtgggcagatcacgaggtcaagagatggagaccatcctggctaatatggtgaaaccccatctctactaaaaatacaaaaaattagctgggtgtggtggcgcccacctgtaatcccagctactcaggaggctgaggcaggagaatcgcttgaacccgggaggcggaggttgcagtgagccaagatcacaccactgcacttcagcctgggcgacagagccagagtctgtcccaagaaaataataaataaataaataaaatttcatgacccagagggtgaagaagatgaggttgaatcatgtaaaggtctagcgatgctgatttaggacagaagaggaaaaaaaaaagaatttcctggcagctcactatctctggctgtttttgttgagggaaaagtgcagggaagatttttcactttgggcattactatgatttgaatgtcccctccaaaactctgttgaaacttaatccccagtgtggcagtattgagaggtggggcctttaagaggtgattgggtgatgagggctctgtccgtatgaatagattaatccattcatgactaacccatggattagtgggctaacatgggaagggacttggtggctttaaaagaagctttaggccatgcatggtggctcatgcttgtaatcccagcactttgggaggctgaggtgggtggattacttgaagtcaggaattcgagaccagcctggccaacatggtgaaaccatgtctctacaaaaaaatacaaaaattagccagacatagtggtgcgcacctgtggtcccagctactcaggaggctaagagaggaaaatcacttgaacccaggaggtggaggttgcagtgagccaagatcgcagcactgcactccatcctgggtgacagattgagactccatctcaaacaaaaaaagaaaagaaaagctttaaaataggaagtgagacctgtgctatcacattagcgcactcagctgtcttgacgtgtgatgccctgtctacctctggatgccacagagtccccaccagcaacagggctctcaccaggtgtgcccctctggatttcaactttccagcctccatatctgtaatagatacattatttttctttgtaaattacccagtttcagctgttctgctataagcaatgcaatacagactaagataggcatggctcatggatttctctcaagatgaggcccaccttggttctaagctgcgtctcctaggaattgagtttttccctaggccggtggggtaagtgaaactataattcattcctcatgctttcccaatcttcttttctactcaggagctaccaattttatccaggtcaaaatgattgaagaaccacgtcctttgcccactgtgtaatgtttcttttgtttgtttgttttgttttttgctggttttttaaattataaattcgtttattttttattttttattttttttgagatggagtctcactctgtcacccaggctggagtgcagtggtgcaatctcggctcactgcaacctccaccttccgggttcaagcgattcttctgcctcagcccctggagtagctggaattacaggcatgtgccaccatgcccggctaatttttgtatttttagtagagattggctttctccatgttgggcaggctggtctcgaactcccaacctcaggtgatccgccaaagtgctgggattacaggtgtgagccaccacacccggcacgtttcttttagatgctggatattagacctttgtcagatgcaaagtttgtaaagcttttctcccattctgtagattgtctgtttactctgttgatagtttcctttactgtgcggaagctctttagtttaattaagggcctattggagggtggagggtgggaggagggagaagatcaggaaaaataactaatggatactaggcttaatacctgggtgatgaaataatctgtaaaaccaaccccaatggcaaaagtttacctatataacaagcctgcacatgtacccctaaacttaaaataaaagctaaattttaaaaaagaaaataaaagtcttctgatcccaaataaaacaacttagatgcaaaaaagtgctataagacatatacattattagctcactcttcttctgaactaagagttcctgctgggcgcagtggctcacgcctgtaatcccagcactttgggaggccaaagcgggcggatcacctgaggtcaggagttcaagaccagcctggccaacatggttaaaccccgtctctactaaaaatacaaaaactagctgggcgtggtggcgggtggctgtaattccagctactccggaggctgagacaggagaatcacttgaacctgggaggcggaggttacagtgagccaagatcgcaccattgcactccagcctgggagacaaagagcagaattccatctaaaaaaaaaaaaaaaaaaaaaaatccttccaagagagtcctgaggagagcagattacttgaggtcaggagttcaagaccagcctgaccaacatggtgaaactccgtctctaccaaaaaatacaaaaattagccgggggtggtggcaggcgcctgtaatcccagctactcaggaggctgagacaccaaaattgcttaaactcgggaggcaggggttgcagtcagctgagattgtgccactgcactccagcctgggtgacagaatgagactctgtctcaaaaaaaaaaaaaaaaatcaggggttataggctgggcttcctgtcccccaactactctggattagaatctcaaaacaagataaagattagaattgcatacttgtacatggtcataaagctggaggttaaataaaaagttagggagccctgtagctggggagcaaactccaacacaggcgtcccttgcacttcccctatggaaaagatcaaaaatgttcgtcttcaaagagattaacaaagctccgggagaccataacaatgtggaggagatgagattggagcatacctgcaggactgattgttgatttttctaccagagggctgcctgttggccatactgaggttccatgtggggatgacgaattctccccaggctcgtgagttcctgtgaggagaaaaggatggaaagagcacctaagtaaggaagctcagaacagggcatgatggttcacacctgtaatcccagcactttgggatgctgagcagtaggatcacttgaggccaggggttcaaatccagcctgggcaatatagaaagaccccatctttacaaaacaatttagaaaattaaccaggcgtggtggtgcttgcctgtagttccagctactcgcgaggctgatgttggaggaccacttgaaccaaaaattagccaggagtggtggcacgttcctgtaatcccagctacttgggaggctgaggtaggataattgcttgaacccagaaggcggaggttgcagtgagccgaggtcatgccactgcactccagcctgggcgacagagcgagactcggcctcaaaaaaaaaaaaagaaagaaagaaagaaagcatgatttgtagaccaaaaaggaattggggaattggggatgacagtaggtgaggcattccaggttaaataatggctttgacccaagtaagacatgagaacatgatacaatgggagtccttctaccatcttcacagattgttttgcaagtagagcatcagcatgggtggaagtagctacaccgtctacattgcattgactcaggaatggcacaggagactgtcctcaatgactgaatcactgagccaggagtagctgtggtctcagctgggagaatccatactcatggctgtattcatgactttaggaggctgctgttgtgaatcatctggatccactatgtggtgtggctgttgtggattttgcaaattctgctctgggtagacgtggcctggagggcagtggaggtggctgttgtccccatggtgatgattgctgttgacatctaccttgcaaaggtcgcctcagtgatgctatttgttgggcaatgctgggctcattggttcctctggtgacgacaggctttctggtgctttgggcagccaggctgtcactgatgtcacacctttgggatgttcctttgagtacagaatgtgctctgatctttccctgttgcatcgctctcttgtctactgggtcaaaacattagcagagaagatgctacatgcaggtgttatgtggagtgccttggtcctcaccacaacctggggagacaagtgctatccttcccattttacagctgaagaaactgaagtctaaggaggtgaaatgacaagcctcaggtcccagaaccaggaagtggcagagttaggattttctttagagagttaacaatatatatatatattttttttttttttttgagacggagtcttgctctgttgctcaggctgaagtgcagtggtgtgatctcagctcactgcaacctctgccttttgggttcaagcaattctcctgcctcagcctcccgagtagctggaactacaggcatgtgccactatgcctggctaattttcgtatttttagtaaagacggggtttcaccatgctggccaggctggtctcaaactcctgacctcaggtgatctgctgcctcggcctccttggattacaagcatgagccattgcacctggccgagttaacagtattttctttagagagttaacaatgtttttaaagtaaagttaacaatatttaaacaccatgatataaagttaatatgttgctttagagatggggtcttgctctgttgcccagactggagtgcagtggtacgatcttagctcactgtagcctcgaactcctgggctcaagtaatccttctgcctcagcctctcaagtagctgggactacaggtgggtgccactatgcccagagaatttttttttaatttttagtagagttgaagtttcactatgttgtccagactggtctcaaactcctggcctcaagtgatccttctgcctcagcctcccaaagcactgggattacaggcactagccaccacacaccacacacagccagagttaggatttattattttattttatttatttatttatttatttattttgacatggagtccttttctgtcgcccaggcaggagtgcagtggcatgatctcggctcactgcaacctccgcctcctgggttcaagtaattctcttgcctcagcctcccaagtagctgggattacaggcacgcacaaccatacctggctaattgttttgttttgttttgttttgttttgttttgttttgttttgttttgtttgagatggactctcactctgtcgcctaggctggaatgcagtggcgggatctcggctcactgcaagctccacctcccggcttcacgccattctcctgcctcagcctcccaagtagctgggactacaggtgcctgccaccacgcccggctattttttttttttttttttttttttttttggtatttttagtagagacagggtttcaccgtgttagccagggtggtctcgatctcctgacctcgtgatccgcccgcctcagcctcccaaagtgctgggattacaggcgtgagccactgcgcccagcctaatttttgtatttttaatagagacggggtttcgccacgttagccaggctggtctcgaattcctgacctcaggtgatccgcccgcttcggcctcccaaagtgctgggattacaggcctgggccactgcgcttggcccagaattagaatttaaccagtagtttttgtagatgctacaccccgcgaggaagacacaagtgccccctgctggccaatccttttagtttatcttcttgtatgtatcagatttagttattatttacgtagctaaaagaatctcgggtctatttggttactttggttacctaatacttgacctatttggaaatagaaaaggatgtttcctgtttgtttagaggcattccaaaggttctacagacagtgatatttcactacctagtcatagccttgtccatgtcaagtagttcgggtgctttcttaccttgggtcctcacacattcttagttcttagctgaatcttctatttttgaaacagggtcttgctctgtcacccaggctggagggcagaggtgtgatcgtagctcactgcagccccgatctcttgggctcaagcaatcctcccgcctcggcctcctgagtagctgggactacaggcatgcaccaccatgcctggctaattttttctttttttaattgtagagatgcagtcttgtcatgttgcctaaagtgatctccaactcctgggctcaagcaatcctccctcctcagcttcccaaagtgttgggattacgggtgtcagccaccacgccagacctcagctaaatcttttctatctttgaaaatgctacagtacccgatgtttcctagaatttagatggcaagctgtgtcatagggacatctcgtgcaggaggggaaaagggtgaaggcatgacgcattgctgaacaagactagtagtaatacttagttggcggggggggcgggtcttgaaatttatggccgggcgtggtggcccacacctgtaatcccagcactttggggggccgaggtgggtggatcacctgaggtcaggagttcaagaccagcctgaccaacatggagaaaccccatctctactaaaaatacaaaattagccggatgtggtggcacatgcctgtaatcccagctactctggaggctgaggcaggagaatcgcttgaacccgggaggtggagtttgcggtgagccgagatcaagccattgcactccagcctgggcaacaagagtgaaactccgtctcaaaaaaataaataaataaaaattaaaaaataaatttggaaagccattcccaagggcatgtagccctagatgattttccagggagtctgaaaagcaatacttacgaagacagttagtcaatttgtaaccttagcattgactaggaacaagtagagcttgaaagggcagctgaggctgggcgcggtggctcaagcctataatcccagcactttgggaggccgaggcgggcggatcacgaggtcaggagatcgagaccacggtgaaaccccgtcttcactacaaatacaaaaaattagctgggcgcggtggcgggcgcctgtagtcccagctgctcaggaggctgaggcaggagaatggcgtgaactctggaggcagagcttgcagtgagccaagactgcgccactgcactccagcctgggcgacagagcgagactcagtcagtctccaaaaaaaaaaaagaaaagaaaagaaacgaaaagaaaagaaaagggcagctgaacccctggagaggcagagaatggggcacttctgtcaatcagcaccacagtggtagatgtctctgccccagttcctgtgggtaggtgggctgtgtgtgtatggagtcaggattgttgttctctagttcgaggaactgaatgggagataggaaggactatgctccccattgcccctccccagcccccagcacccattattctgctttctgtctttatgaatgtgatgactctaggaacctcacataagtgggatcatacagaatgtgtccttttgtgactgccttatttcacttagcacactgtcctcaacgttcacccacattgtagcatgtgtcacaatgtccttcctttttaaggctgaataatattccattgtgggggccaggagtggtggctcacgcctgtaatcccagcactttgggaagccaaggcaggcggatcacttgaggtcagcagttcgataccagcctggccaacatggtgaaagcccgtctctcctaaaaatacaaaaattaggctgggcacggtggctcacgcctgtaatcccagcattttgggaggccaatgccggcggatcacctgaggtcaggagttcaagaccagcctggccaacatggtgaaactctgtctctataaaaatacaaaaataagccgagcatggtggcaggcacctgtaaccccagctactcagaaggctgagacaggagaattgcttgaacccaggaggtggagattgcagtgagccaagatctcgccattgcaccctagcctgggcaacagagcgagactctgtctcaaaaaagaaaaaaatacatatatatgttatatatatatatgcaaaaactagctgggcgtggtggtgccctataatcccagctactcaggaggctaagatgggaggattgcttgaagccaggaggcggaggttgcagtgaactgagatcacgccattgtactccagcctgggcgacagagtgagactccatctcaaaaaaaaaaaaaaagaaagaaaaaaaaattccattgtggggatggaatatatttttttaatccattaatctgccaaaggacatttggatggtttctacatttggggcattgtaaataatgctgctatgagcaccggtgtataaatacctgcttgagtctctgttctgctttcaattcttttcaatatatacccagaagtggtgttgctggattatctggtaattctatttctaattttttttttaggaagcatcatactcttttccacagttggggcaccatttagactcccacccgcggtgcacaagtgttctaatttctgcacatcctcagcctcatttgttataatatttttatgttttcctgtgttgttttgtttgtttttgtagcagccacctaaacggatgtgaagcttacagtgctcacatggtgaataatctctccctccttcagcagtcacacttaactaattaatgtaagttgcatcctcataggatgcacattaaaacaattccagctttcaccagggttaggaagaggggctttgctttgtgtcactggcacccaccctcctatttctgacaaccaaaaatgtctccagatatgacaaatgtctcctgggagacaaaaatcacattcagttgataaccactgtttggaggcagcatgtaatttaattcagattttacagttactcggtcacatagggcgtttattcccaagacactggaggttcagagaggtttccttatttgtccagaaagtagcagaggtgggatttgaacccaagctgtccaatatcagtgtctcctctgttaactgctctgttgtgctgcttataaagtcatcatcccaatacaaggtcgggcgcagcggttcacgcctgtaatcccagcactttgggaggccaaggcaggcagagtcagaagttcaagaccaccctggacaacatggtgaaaccctgtcgctactaaaaatacaaaaattaacctagtgcggtagtgcacgcctgtaatcccagctgctcaagaggctgaggcaggagaatcgcttgagcccgggaggcggaagttgcaagagagtcgagatcgcaccactgcactgcagcctgggcgacagagcaagattctgtctcaacaaataaagggaacagaactagactcctaggaaagggaggacctaacacccagaggcaaggagcaggaggcagcaggaagaacctcagcagggctcctgccttgaaccccttctgcctgcctgggctggttccctccaaggagacacctggggaatcatctcccagcaatgggaaacctgcctgtttatgtgacagggttggtggccacactcacagcagccccatcaacgccatctgcctctaggacactgtggatatggagagagaaggtgagcgggtagatgagagggtcagggggaggatgaggaccgggctgtctctcctgcctgctcctgaggaagccagtgtttgttcattttttttttcccctcttttgagacagttttgctctgctgcccaggctgcagtgcagtggttcaatcatggctcactacagcctccaacttctaggctcaagcaatctgtccgcctcagcctccctagtagctggaagtataggtgcatgccaccatacccacctaatatatatatatatatgtgtgtgtgtatatatatatgtgtgtgtgtgtgtgtgtgtatatatatatatttttttatggagatgggatttcaccatggtacccagactaatttcaaattcctgggatcaagtgatcctcatccctcagcttcccaaagtgctgggattacaggtgtgagccactgtgcttggcctgttttttgttttttgtttttgagacagggtctttctctgtcaaccaggctgtaatgcaatggtgcaatcatagttcactgcactctccaacttctgggctcaaccaatcctcctgactcagcctcctgagtagctgggactacaggcactcaccgccatgccagcctgccaatatttgtgagtaaggcagaagacacagagtttacttacacagtcctcagattcaaatcacctttctctttttttggggtggtggggagacggagtctcactctgtcacccaagctggagtgcagtgatgcgatcttggctcactgcaacctccacctcctgggttcaaacgattctcctgcctcagcctcctgagtagctgggattacaggctggcaccactacatctggctagtttttgtatttttagtagagaacatggggtttcaccatgttggccaggctgttcttgaactcctgacctcaagtgatccacccgccttggcctaccaaagtgctgggattacaaggtgtgagccactgtgcccagcccaaatcatctcttgaagactcattttctttccttcctaaaatcaagccaattgcaatcttcccagagcaggaaacaaaatgcacagtgggaggaaaatgaaagaagtggactcagtgggactcaagtcccaattactcactgtgtgatctggggcaagtcacttaacctctctgagccttgtctcctcatatgcccaacggggataacagcagagggctgttgagatgatgcagtgatgtgatccaccatgcagggtgaaggaattaggacttaataaactcctgttactgtttttttttggggcggtggggcggttttttgttgtcattttgtttttttatttttgttttttgtttgtttgttttgagacggagtcttgcactgtcgccaagctggagtgcaatggcgtgatctcggctcactgcaacctctgcctcctgggttcaagcaattctcctgcctcagcctcccaagcagctgggactacaggtgtgcgccactacgcctggctaatttttgtattttgagtagagatggggtttcactgtgttagccagaatggtcttgatctcttgacctcgtgatccgcctgcctcagcctcccaaagtgctgggattacaggcgtgagccaccgcccagcctgttactggtttttattatttattattatttaattattattattattattatttattttattattacctacccacggagctgatgagtgacgccggggaggaagggtcgtgggtcaactgcctggtggctccaagtgttccttggtctgtggtttgggcaaagaccactgcgtcgaaaggcagccctgtggaggaagaaccaagttggttatcccagcaggaagtagaacgaaaaacataaaaaaaaaatttcttctggacttgctcttctttccataggaatctctgcatagtgactcgttcatttaccatttcatttatttaatatttattccagaccctcagtcactcattcatccaaccagcaaatatgtcttgagcaccttttatacgacagctgattctgaaaccaacccgatagtctcatagacagtatttatatacctatttaaatacttgaaactgacatttgttattgtttaactattttaggtttggggctacgtgtgaaggtttgttatataggtaatctcatgtcacggggtttgttgtacaaatgattttatcacccaggtatgaagcctagtacccaatagttattttttctgctcctctctctcctcctaacgcttaccatgaagtagaccccagtgttttttattcccttctttgtgttcatgagttatcatcatttagctcccacttctaagtgagaacatgcaatatttggttttctgttcctgggttagtttgctaaggataatggcctccagccccatccatgttcccgcaaaagcaatgatcttgttcttttttatggctgcatagtattccatggtgtatatgtatcacatttgctttatccaatctgtcattgatgggcgtttaggttgattccattgtctttgctattgggaatagtgctgcaatgaacattcacgtgtatatgtctttatggtagaatgatttatatttctctgggtatatacccaataatgagattgctgggtcaaatggtagttctacttttagctctttgaggaattgccacactgctttccacaatagttgaactaatttacactcccaccaacagtgtataaatgttcaattttctccacaaccttgccagcatctgttattttttgactttttaataatagccattctgactatggtgagatgctatctcattgtggttttgatttgcatttctttaatgatcagtgatagtgagcatttttttcatatgcttcttggctacatgtatctcttctttcaaaaagtgtctgttttttttgttttttggttttttttttttgatacagtgtctcactctgtcgaccaggctggagtgcagtagtgatcgcgcctcacagcaacctccgcctcccaggttcaagtgattctcctgcctcagcctcctgagtagctgggattacaggcgtgcaccaccgtgcccggctaatttttgtatttttagtagagacagggtttcaccatgttggtcaggctggtctcgaactcctgacatagtgatctgcccgccttggcctcccaaagtgctgggattgcagttgtgagccaccgtgcccggcctttgcccactttttaatggtgttgtttgtttttctcttgtaaatttacttaagttctctatagatgctggatattagacttttgtcaggtgcatagtttacaaatattttctcccattctgtgggaaacttacatttgttttatctgagttccttcctcattaaaggacccccagtcctctcaaaaagtatcaaagaaaagaaactcagcagatcatcatatccagacaatgagatgtcagacccctcattcctcatgattgcttcctgacccctcttgatttcctgttttactacacgtagtcacatttcttccctgctatataaacctgtaattttagttggtcagggagatggatttaagactgagctcccattttctcactgcagccaaggagattaaagtcttcttccttggtaataatcgttgtctcagtgattgactttctgtgtggtgagcagcaggacctagcctggacccctggtgttttggcaacaattccaagtttggggcacagagtgaggaacaagacaagtctttactccctcaaaaagtttatgtccagaacagaaaaccaaatactgcatgttctcactcataagtgggagttgaacaatgagaacacatggacacaggtaggggaacatcacacactggggcctgttgggggttggggggctataggggaggtataacattaggagaaatacctaatgtagatgatgggttgatgggtgcagcaaaccaccatggcacatgtatacgtatgtttgttaacctgcacgttctgcacatgtaccccagaacttaaagtataaaaaaaaaagtttacatcctagtggagaaagcagacaacgattcatccaacagataaataattaatgtccttgcagagagtgaagggaattttgaagtcactctaccaatgggagagaagcataattttccatagagtcatcagggaagacttctcataggaggtaatatttaaggagggccctgagagatgagaaggtacttatcacaggggaaatgtgcttgtgatggagggaactatatatgcaaaagcccagaggctggaataaacctgacccactcgagaaatttcaagaaggccagggtggccagagtgcattgagaaagcactggagtgctttctggctggagtgtaaggcgaaaccagctgggtaagcagaggtcagatctaatgaggagaaagaggaggaagggttgtaaaccagtgatgtatgaagtttagattttcttggaagtgcaatggaaagtcacggaggatttgaagcaacgggtgagggttgtgaccaggttagcattattaagagataattctgccagaaagcaaggaagtgctcaaagactaaggagatgatgttacaaggacaaagaagaggctataaagtcctcaagattggccaggcaccgtggctgatgcctgtaatcccagcattttgggaggctaaggtgggtggatcacgtgaggtcagaagttccagaccagcctggccaacgtgaaaccccatctccataaaaatacaaaaattagctgggtaatcccagctacttgggaggctgaggcagaagaatcacttgaacctgggaggcagaggttgcagtgagccgagatcatgccactgcactccagcctgggtgagagagccaggctccatctcaaaaatggatgaataaataagcaaataaagtcctcaagatcagaggctatgacttcaaactatactacaaggctatagtaaccaaaacagcatggtactggtacaaaaatagacatatagaccaatagaacacaatagagagcccagaaataatgccacatacctacaaccatctgatcttcaacaaaactgacaaaaacaagcaatggggaaaggactccctattcaataagtggtgctgagataactgggctacccatatgtagaagagagaaaaaaaaaaacaaaaaaggaaaaagaccatgggatgtaaaaatgtgaatgactgaaattttggggaaacttttattggatgtgtattttcatacctacagccctcaccaagaaaatacacacaaacacacacacacacggtcctactgaatggcactaaattatccacatactcctgatagattatttcactccctacaaacttctgagatggaagaagccagcttcctagggctccagggaggagaggaatttatgataagatagagcaatcccagtttcttagactaactagccaaacccctgtcaacctaaatagcaaacagagacagactctctaaaggaaaatatgttcatttgggaatagaacattgcagtgggaatatgcatgccactgtaatatacgtgcctattcaggaagacaaagctttttagaggaaaaattgaggagaattgcataatagttttgaaatatttgtccttggctacaaagatcgataacaaggataacaccttttctgtagagacagcgtcttggaaggctgggcacggtggctcatgccttaatcccagcactttgggaggctgaggcgggcagatcacaaggtcagagtttgagaccagcctggccaatatggtgaaacactgtctctactgaaaacacaaaaattagccaggcatggtggcgggagcctgtagtcccagctattcaggaggctgaggcaggagaaccacttgaacccgggaggtggaggttacagtgagctgagatcatgccactgtactccagcctgggtgacagagcaagactccatttcaaaaaaaaaaaaaagagagagagagcaggctgggtgcggtggctcaggcctgtaatcccagcactttgggaggctgaggcggatggatcacgagatcaggagttcaagaccagcctggccaacatggggaaaccccatctctactaaaaatacaaaaaattagccgggtgtggtggtgcgtgtctgtaatcccagctactcgggaggctgaggcaggagaatggcggtgaacccaggaggcggaggttgctgtgagcggagatcacgccattgcactccagttccagactgggcaacagagcaagactccatctcaaggaaaaaaaaaaagacagacagcgtcttgggttcaagggatcctcctgcctcagcctcccacactgctgggattacaggtgtgagccaccgtgcccggcctgcaggagtattttttgcgtaaggttgaggtggcctttgtgcaaggttgtggcttttggaatcttttgtgatagttgttatcaggcataccagcatgagaaccctcctttcatggccctccgtgactctatttgcccccttcattcatgcaacacatatttattgcacaactactatgtgccaggtactgcaacaggctgcatttggcaatgtctgaagacatttttggttggtgggagtgctgctgccatcccgttgtagggaacctgggatactgtttagcacttgaccaatatatgggacagcccaccctacctccccaaaggattatgagacccaaatccattgacatttgtgctgggattgagaaacctcgcttcagtgggattggtccaggttgtagcatacagggttgttgccatggagacaggcagataacgaacctgttcagtgggttgagagcagcatccaaaataaataaataaataagagaatataatagaattaaaaggcatcaggggctgggcacggtggctcacgcctgtaatcccaacagtttgggacgctgaggtgggtggattacctgaggtcaggagtttaagaccagcctggccaacatggtgaaaccccatttctactaaaaatacaaaaaattagccaggcatggtggtgggcaccggtaatcccagctactcgggaggctgaggcaggagaattgcttgaacccaggaggcagaggttacagtgagccgagatcgcgccattgcgctccagcctgggcaacaagagtgaaacatcttctcaaaaaaaaaaaaaaagaaaagaaaaaagaaaaaagtattttcatcatgcatctataagcaaaactggtcacaatggtaggatggtactggtacactggtacacaatacattgcacactggtacacaatgtgcaatgtatttcttaccatggatcccagtctaaaaagactattagactttttagctaatagctaataattaatgttagctcctgcatcagctcatcgtctgataggcagcacctgccttcctccctacctcatctctttgcctcgttctctcaatactgggagtcactgagaaagaggatgtctcagatcacaggggagctgggtcagaatcactagggtcttacagacccagtctgcccagggtcaaagcccagccctaccacatagcagctatgtgcccttggacaggttgcataactaactgcgccttggtttccttttctgcaaaatggaaatgataataggacgtacctcctattgtcctccaagttgttatgaggatttaatgaattcatatctgtaaagagcttaaaagagtgcctggtacatgttagtgttccctgttagctattatcattatcatgacttgctctagaatagcacttaccccagagtgtaattctttttattattaggggaagggggcaatgtgggttcagagtcactgagagggggtggatcagagccaggataaggatgagaagcccggctcagattcactgtgtgttggggacagggttggcagagctgcaagtgctaggacaagtgcaccaaaacaggtctgacaaagggttaaatgaagcagatgggattgttcagggtgggatgaaaggtccagggagggtggggacaatcaggcaggctgcctccctgcaccgcagtgtttgtttccttgacaggtgggaggcccagctccactcaggtatgtggccagaccagccagggcagccccctggacctctcatcccaggcagagatgaggagagggacagggtggggccctccagcccaggatggccccggcccacctcctctctcccacccaggaagggctgagccactttggacaatgggctgagtcccctggccccattcagccccactggcctggcctgtccccacagggactgctggaggtccttggggggatgttggcaccaactgctcctttgtcttgctacttaccctagaaagaacaagctaagggctctcctccccaactgaggaaagcaggatattttgccacgagcggcaaaggaggacccctgctgccccagaggaagaggagggaaaacatatttacccacacatgcacacacacaaacactcatgcacactctctcacacttatgcacacacaaaaactcatttgcatgcatgcacacacactcttacacacggacacacatgcacgaatacaaacactcatgcacacacttaaacttatgtacatactcacacagtctcacacatgtgcagactcagtcactcatgcacacgctaatacacacacaaatgcacatacatatgtatgcaaaatacatatgcacacacacacagctacacactcacatgtaagcattcaaacacacccacacatggacacacatgctgaaaaacaagcacaccctcattcatgcacacccacacacctatgcacacatgcatacacacatgcacacacatattcacactcgcacacatattcacacatgcttatgcacacacgctcagtcacacctgtgcacactcagacactcatcgcacacacttgtagacacataggtggatgcacacacaagtatgcacgcaagcactaagttgcacactcacacatggacacgtgcacacacttatgcacattcactctaacacacacatgctcatgcagacacacacaaggcacacacagacacataatcacacacttatccacacgcatactcactgggcaggaactcaagtcctagagttctgggtttcatcctggttctgccccaactcgcttcactgagccccagtttccctacagttaaagcagaaatagcagcatacacctccccaggcattgcaacaaggtcaacctgagatgagctagtcgtgaatctgtaacaagaaccccacccctcaagtcttagcttctcagtgagggcctttccttgaacccactttattggaaagagcaatgtgcccccacaacacactccagcacccccgagtctccatcctgtttcttttctccttattcccttcttttctggagtgcaatggctcaatcttggctcactgaaacctccatctcccatgttcaagcgattctcctgcctcagcctcccgagcagctgggattacaggcatgcgccaccacaccctgctgattttgtatttttagtagagatggggtttctccatgttggtcaggctggtctcaaactcccaacctcaggggattcacccgcctcagcctcccaaagtgctgggattacaggtgtgagccactgcacccggcccccttattcccttcttaacaatgcatcacgtacttactctggttttggtttaaggtcatccccctttgctgaaagtgtcagctcagcagggatcttttgatttgctcacagccatcccctcattgcctagaacagtgcctgcacacagtaggtgctcaataaatactcattgaacaaattgaatgaatgaatctcttcaaaagtattgactaaagaggtaaagggcccttcttgatagagtaaaactgcaaagaggacccttccttgatatcagtgtgcaaaatctcacatcaagggacctcccctccacaaaaaaagaataataaagagtccttcttttccaggttgagaaaggaggggatgtctcctctcctgggaagagtgacgacatctctagaagccaggcatgaaagaagagaatgaaaactccatccggtgtggattgaggcagagaccctactcacttcctgtggttcctcaaaaaattaaaaatagaactatgagccgggcacggtggcttacacctgtaatcccagcactttgggaggccgaggcgggcggatcacttgaggtcaggagattgagaccagcctggccaacatggtgaaactccccgtctctactaaaagtagaaaaattagccaggcatggtggcaggtgcctgtaatccccgctactcaggaggctgaggcaggagaatcacttgaacccgggaggtggaggttgcagtgagctgagatcactccactgcactgcagtctgggcaacagaggaagactccgtcacaaaaaacaaaaaaagaaacaaaaaaaaaaaacctgtgagctgagcatggtgattgatgcctgtagtcccagtgacttgacaggctgaggcaggaggatggcttgagcccaggaattggaggctgcagtgagctatgattgtgccactgcactccagcctgggtgacagagcaagatcttgtctctaaaataaataaataaataaaagtagaactaccatatgatccagcaatcccacttcttggaacatatactgtgaaaggaaaataaatctcgagaccccaaaatcacaaagccaaagggaaaagtcaggttgagaactacatcaggcaaaccagcctcccatttcattcccaaataagatagctaccaaattgtttgtttgtttgtttgtttgtttgttttagacggggtctccctctgtcgcccaggctggagtgcagtggctcagtctcggctcactgcaacctccacctcccaggttcaagtgattctcctgcctcagcctcctgagtagctgggattacaggcgcgcaccaccacgcctggctaattttttttgtttttagtagagatggggtttcagcatgctggtcaggctggtctcgaactcctgacctcgtgatctgcctgccttggcctcccaaagtgctgggattacaggcgtgagccaccgcacccggccaatagctaccaagatttaaaaagcaacatacctccctcaaaatttgcccacaaggaaattctttgtgggactcaagatatttaccctaaaacagttctgttgaatttcaccttggcaatgtaaatggacagcttatctttacagatgcgggacagaaagtcatccctccgctcgcctgagagaaatgcatatctgattgcttcctctgccctattgttcatgtaaaaatgcagatttatggacccagactaaggtttaagtgactattcctctacctccctctcacgtgtaaactgtgtattcagtgaaaggctaatcaaagactcaaaagtagccgggtgcagtggctcacgcctgtaatcccagcactttgggaggctgaggtgcgcggatcacaagatcaggagatcgagaccatcctggctaacacggtgaaaccccgtctctagtaaaaatacaaaaaattagccaggcgtggtggcgggtgcctgtagtcccagctactcaggaggctgaggcaggagaatggcatgagccctggaggcggagcttgcagtgagccgagatcgcaccactgcactccaacctgggcgacagagcgagacttaatctcaaaaaaaaaaaaaaaaaaaaaaaaaaagactgaaaagtatgcaaccatttgtctcttacctacctataacctggaaaccggccccctccccacccccccgcccacgccgctgccacttcaagttgccctgcctttccagaccaagccattgtatcttacacatcttgattgatgtctcatgtctccctaaagtgtataaaaacaagctgcaccctgaccaccttcggcaaatgtcatcaggacctcctaaggctgtcacaggcgtgttctcaaccttggcaaaataaactttctaaatggatggagacctatctcaaatactttgagttcacaatccaaacaaaatcaaatcagtatctccaagagacatctgcaccccccacgttcattgtagcattattcagagtagccaagatatggaaacaatttaagtgtccaccaatggatgaacagacaaaaaaattgtggtttatctacagtggaatattattcggtctttaaaaagaaagacattctgccatatatgacatcatggatgaattggaggacattatgcgaagtgaaataagccagtcacaaaaagacaattactgcatgatctcactcacgtgtggaatctaaaaaagtcaacctcgtggacaggtgcggtgcctcatgcctgtaatcccagcactctgggaggctgaggcaggcagatcacctgaggtcaggagttcgagaccagcctgaccaacacagtgaaaccctatctctactaaaaatacaaaattagccaggcatggtggtgcacgcctgtaaccccagctacttggaaggctgaggcagggaaatcgcttgaacccgggaggcggaggttgcagttagccaagatcatgccattgcactccagcctgggcaacaagagtgaaaatccatctcaaaaaaaaaaaaaaaggaaagaaagaaaaaatgctaaaagagttggtcttaaatgttctcacaatctcactattgcccctgcgccggcactaactgagactcaaactcctcgttgtcgtatttgtcggaatagtaaatttgtttgtgggacatgaccgctccatctgcgagccttcagccccaagctgccaacctccaagcaactcccagcagcaggcaggtataaagttttagttatgcaggatgaacaagttctggagacctaatgtacagcatggtgactataggtagtaacactgtattatatacttgaaatatggtaaaagaaggctgggagcagtggctcacgactgtaatcccagtactttgggaggccaaggcaagcagatcacctgaagtcaggagttcaagaccagcctgaccaacatggggaaaccccgtctctactaaaaatacaaaattagcctgtaatcccagctactcaggaggctgaggcaggataattgcttgaacccaggaggcagaggttgcagtgagccgagattgcaccactgcactccagcctgggcaacaagagttgctccatctcaaagaaaaaagaaagaaagaaagaaacatgctaaaaagagtttatcttaaatgttctcacaacataaaaaaaggtaatcatgtgaggtgatgatgggtatgttaattagcttgattgtggtaatcatttcacaagatgtacatatatcaaagcagtgtattgtacatgttgtatatgtatatggtgggattgctggatcatatggtagttctacttttatataaatacatgcaatatttatttttcgagtataactcaatacagtggggggtgggggggaagtagtctattaccttgttaattcattcattcattcatgtaacaaatatgtcttgtacacttactatgtgccaggtactggaacaggctgaagagaggaagtgtcaggaaggaaatccgtataggagagcatctgggatggaagagtgaccctcatgtcctggtctacccagggctttcttagttttactaaagtccctcatcgaaggaactgcctcaggctcaagcaaactgggatatcctactggtcatcctactgcgatctgtgtcctcctgacctggcatttgtccctgcggctctgggactgtgatcagtttaggtccctgggcacagctctgagctgcaggagtgaggagcttttgggagcacctccaaggtggagaagaagaggctggtacctggattagaagtcgggcctggataatggcaggaagatcaagagaatgggttcagttctaccctggctacctgggggtcttctctttgagctttttttttttttttttttttcctgagacaaggtctcactctgttgcccaggctggagtgcagtggtgcgatctcagctcacagcagcctctgcctccagggttcaagcgattctcgtgcctcagcctcccgagtagctgaggctacaggcgtgtgtcaccatgcctgactaatttttgtattttttggtagagacagggtttcaccctgtaggccaggctggtctcgaactcctgacctcaggtgatccacctacctcggcctcccaaagtgctgggattacaggcgtgagccaccgcacccagcccttcctctttgagcttctgttctctcatctataaaacggggatggtcatctggaccactgaatctacaatcagcatgagtgcatgcttggataatctgctatgtctggccttctggcccttgaggctccagagaggtaggaagagtctccttcacttgctcaatccaccctgggagaaccaagtgaccagacgaatccactgagcataaagaatgcccaggccggccgggcaccatggctcaggcctgtactcccagcattttgggaggctgaggcaggccgatcacttgaggccaggagttcaagaccagcctggccaacatgttgaaaccccatctttactaaaaacacaaaaattacctgggtgtggtggcacacgcctgtaatcccagctactagggaggctgaggcagcagaatcacttgaacccgggaggcggaggctgcagtgagccgagatcacgccactacacttcagcctgggcgacagagtaagacaccgtctcacaacacacacacacatacacacacacacacacacagagagagagagagagagagagagagagagagagagagagagagagagagagagtacacccagccaggcctgcccctcttggacccattgtcttcctttgctacccagcaactgggaagaaaggtaactctctctccaggattggaggaaacagtaagcaaacctttctgctttttggtgaaccaaaagtggtgaaagataaactgtaactctggcaagggcaggttagaccaggaacccacctcacagttccacccatgcccactacacacacccactcccaccaatgcccccttcccttcataatccaactcccttaacttcatatccccctggccaggcctgggctgggacaatgaccactgttcagggacccaggaaggggctcagcagcgcacaatgagatctgcctatgttctgtgtcttcacagcccttctcctgggacgggcagtacagaactcatttcctcggcggtgtggggggactcacgtacccagaaactgccaggagaggagaaatcctcaaccttcagtctcttcccaggcaaaggataaaaaccagcatttaggaatcatccagaaactggagttggaatcctggccgtgtgactttaaacaaaaggcttaagctctctgagcctgttttctcttctgcaaaatgggggataacggtgcccctgtgttcacccgtcaggcaggttcaacggagacaacacatgtaaagtgcaggaacatattacatagaaggtggatcctataaaatgatggtgggccgggcgcagtgcctcacgcctgtaatcccagtactttgagaggctgaggcgggtggatcacctgaggtcaggagttcaaaaccagcctgaccaacatggtgaaacccccatctctactaaaaatagaaaaaaaaaattagctgggcatggtggcaggcacctgtaatctctgcaactcaggaggctgagacaggagaattgcttgaactggggaggcagaggttgcagtgagccaagattgcgccactgtactccagactgggcgacagagtgggactctgtctcaaataaataaataaaataaaatgatggtcacagaggtcctttgggctcttggagtttctcagccacagggtggagggagaggcaactgggagatggatttctccagctctggaattcttctaaaaattgctctttggggagatggaaattcagagaggttagatgtctggctcaaggactcacagcttgccagcagtgggctcagatttacggccagggattaagagagtcttctccagtgttttatgtcaaaaatcccgcatggtgtctggactgactccaggggaatcccttgggaagggactgatgtggccagaggggtgatggggatggggaggggtgtcagcccaaagcccagtcctccctgaaacaggagcagggtctgcccaatgcaaacagcccccggcatcagaccctgagtgaaccttggggacaaatgcagtaaacagcctctgttggtggtgacctgctttgagtacaggtcagggggacacgccccactggaggtggtggggttgtcctatacaaacccgcccaccattcaggccattgtgtggaggcctcacaatggtgtccaaccacaaagctctccctccgtccccgactgcccggcctcggtgactcagggctgggggactggggtgccttcctcacctgcttctcaggctagatccggggcccgagtagggaagggcatgggggcaggtgaatcacagtctgtctgcatccagggcaccccccctccccggatggaggaggtggatgggcctcccccaaccccaaccccttgaggcccctcgtggcctccgtttccaggccaagctgtgagaaacagtccttcctcctcctctgagtaaatgaacagacatctgagcacccagctcattatagatctcctcttctgcaagcctcagttcatcttgcacacgagggctgtttggtgaaaaagccccaacttcctgccctcggaggcaaccggagtaaaataagttctgggtgggtttgggcagtcctgggttcaggtatgaacaatcttgaaacttccctgtagggaagagaggctggctcccttaagcccgcaacaacacacagaaacaccaagctggatgccagcccttccctgagcccagggtcttttctctgggcagtaatgtccaggctaatctcctaaaatgaccaacagttcttgaaagacccctttggacccaggaacatgcctcccacagccctcccacgctgcgtttctgcttccagtccttccctcggtatctccccatcacgcagcccagatacatgcagctcacaggaaaggacccagatacgcctgatggctccctgcctcctagtccatgcctactccgtccccgctgccgggaacgcccttctcttttgctcctaagtgtgcctgtaaaattccaaccctgtgcaattcagatgccaccctgcagtttaagacccctgcccccaccgccaccacccttaccccatcaatgcctcttagcaaagttcctgctcagccctgtaccccgactgactggacgccccagtctctctcgcccaccagatcggagctcctggaaccctgcggcggcgacttgctcatttctgtccctgagagctgggcacagatactgggactggaggtgccgctaaaaccccctcagggagtgagtgtgtgagtgagtcggtgatggaaggaatccttgggtgtttccacactcatctcggcagatactcaattcacaatacagcggttttgtgaactcgcccacgtcagtctggtaaatgcagattcattgggtcgggctggaggaggcatttacagaaaagcaaaagcaaaagcaaaagacctcctggctgtccctgctggggcttaggaagcacaaatcacctgtcataccagcctctctcctatatgaatccgtccagctcctcagtgagccccagcccagtcccacttacctggccagcaggtgaggaggaggctcacggccagcgctagcaggggcctgcgtcggtgccctgggtgtgcagggccctcccggcccatcctactgcctgcccaggctgtgctcctcaccccccgagagagtccctgagactgaacccagcccagtctggccccggctgcagggagggtggtgaggacacaccttgctgagcttctcaagaggggcagggcttgccctagagggaagcagtgggtgccttcctggcaaaggtcagctggcatgattcagtgcactcagtgactgacacctgcaggctgataccttccgagagcagcggcccgagggagcccccaccgcggacagagcctgactccagagtctgttgccaaactgggggtccctctgggcttgaaggaaaacagggacccaggcatagacctgtcccgttctccaaagtccccaggttctacctgaccccctcctgcgcagggactggcaccgccagactggagctgggtggaccctccttgggggaggcacagctgcctctggagggttttggaatgttcaggagtgtacgcgaggctgcattcccacataggaactccctggctgccaggggagctgagggccggccttctcgtacccttccaaagccccacagagccacacccgctatactcctgccgcgctctgagtcctacaaaaccacctcggggctgcagtccctcactccccggtcaagctcttcagctgcccttgacagcagcagagaggcaaggaaggggctggtgtggggtacagggaggggattgggggttcttcctcctcctcaccagccctgcaatctccaccagcttcttctcaccccaggcctgggtgatgacaatagtcatttcagaagtaggctcttccccctcaaatcggcccagcacagattgcagggtgatgttttttaagtaccatgcccctcaagacacccccctgctgtccccctttgtccaggcactcaagagaccccccacccctctagcctctaacagtcagaggaagtgggtttatcatcacccatatcacccatctttttttttttttttttttgagatagagtctcgctctgtcacccaggctggagtgcaatgacgtgatctcggctcactgcaaccgccacctcccgggttcaagagattctcctgcctcagtctcccgagtagctgggattataggtgtgcgccaccacgcccagctaatttttgtgtttttagtagagatgggtttttgccatgttggccagtctggtttcgaactcctaaccttaagatccacccacctcggcctcccaaagctctgggattacaggcatgagccaccgtgcccggcctgtcatcacccatcttcaagataaggagacacctgcaggtgcccagtgtgaaggaggcaggcagtggatttggacctcagcgtgccagacacccccacagggccaaccacttctcctgggtcttgtacctggagccaaactccatggccctgtggctgggctcatggcccagggaagtctgtcagcaacccctgggggcttatgctctgttcaatttcctattaaccgtttctcttctctccttgctctgtagcccttcctctcagcatagacataccttgagccccaggaaacaccctgggcaggcaatctggccaaaacagataaatgaacaagtacaggtgatcaagctggaaatgagaggtaggtgggagatgccaaacccagactgggagggggcagggaatcagggaagtcttcctggaggaggtggcacgtgcatcaagatggaaagataggctggagtcctccagaccaggggagatggagagaagggaagggaagggagtttcccaaggaggagacagtggctggaagcaacagaaaggaaagctggaaggggaaagttgagcctaagttttgtccaaactcccaccctagttctctctcaaggtacccgtccctcacttaagaaaaatcatcgcagagaaacagaaggcaagccagtgagttttctgggcaatcactgtattcaatttcgcctacctcagagatgggaaaactgggcccctaaaaagagtatcacctgtaatcccagcactttgtgaggcagaggcgggtggattacctgaggtcaggagttcgagaccagcctggtcaacatgatgaaaccccgtctccactaaaaatacaaaattagctgggcatggtggtgcacgcctgcgatcccagctacttgggaggctgaggcaggagaattgcttgaacccaggaggtggaggttgcagtgagcggagatcgtgccattgcactccagcctgggagacaatagcaaaactccatttcaaaaaaaaaaaaaaaaaacacagagcaccagaatctgcaagatcagcgacagaactggaaacaggccccaggactctggagtccacaaccagtgctcttcccgagtaagcagtgcaaatcctctttctctagcacacagcagcaagtatccctaagcaccatagtacatcatgccttaggtccaggggtcgcccattcttataaggagtgcatctgggaaaatgggtttagattccagataggtcattagagctcctggtttttgttttgttttgttttgtttgttttggtttttgtttcattttgttttgttttttggggatggagtctcgctctgtcacccaggctaaagtgcaatggcatgatctcggctcactgcaacctccacctcccgggttcaagcgattctcctgcctcagcctcccaagtagctaggattacaggcatgcatcaccatgcctggctaattttgtatttttttttttagtagagacaggctttcaccatgttggccaggctggtcttgaactcctgacctcaagtgatccacccacctcggcctcccaaagtgctgggattaccagcatgagccactgtgcctggccctgttatcctaaatgaataacccagggacagaaaatcacgttctcacttataagtgtgaggtaaacaacggatatgtatggatgtgaagatgggaacaagagacactggagggtactacaggtgggaggcaggaggcggggctagggctgaaaacccacctattgagtactatgcatagtatctgggagacaggtgcattcgtaccccaaacctcagcgtcatagaatatacccatgtaacaaacctgaacataatttgtacctcctgaatctaaaataaaagtggaaattataaataaataaataaataaatgtttttaaagtatgttttaaaaaattaggccgggtgcaatggctcacgcctataatcacagcactttgggaggccaaggcaagtggattgcttgaggccaggagctcgagaccagcctggccatcagggtgaaacctcatctctactaaaaatgcaaaaaaattagccaggcatggtggtgcacgcctgtaatcccagctactcaggaggctgaggcagaagaatcacttgaacctaggagggggaggttgcagtgagcgagatccagcctgggcaacagagtaagactctctctcaaaaaaaataaaataaaatagcctctgactgttggtggtaatgtaaattagttcagcccctatggaaaacagtatgaagatttcccaaagaatgaaacatagaactaccattcaacccagcaatcccactactgctcaaagggaaaaaaatctgcccaaaggaaaagaaattgtcttatctaaaatacacttgcacctgtatgtttattgcagtactatacacaaaagcaaagttgtggaataagtgtccatcagtggatgaatgaataaagtaaatgtggtaagtatacgccatggaatactatacacccataaaaaagaatgaaatcatgtcctttgcagcaacatggtggagatggaggtcattatcctaagtgaaataactcagaaacaggatgtaaaataccatgtgttctcacttaaaagtgggagctaaacaatgagtatacatggacacaaagatggaaataataggcactgggaactccaaaaaaagggagggtaggaggaagagtgagggttgaaaaattacctattggccgggtgcggtggctcatgcctgtaatcccagtactttgggaggccaaggcaggtggatcacctgaagtcaggagttcgataccagcctggccaacatggtgaaaccccatctctactaaaactactaaaattagccaggcatggtggcgcattcctgtagtcgcagaactcgggagactgacgcaggagaatcgcttgaacccgggagacggaggttgcagtgagccgagatcacaccattgcactccagcctgggcaacaagagcaaaactctgtctcaaaaaaatttttttaaaaattaaaaaaaaacttggatgatgaaataatttgtacaacacacccccgtgacatgagttcacctttgtaacaaaccttcccatgtacccttgaacctaaaagttttttaaaaaaggaactgggggagaagtgtacagatttctgggtgctctcttctcaaaggtctgcctgccccttgtgggaaaatggagaggaccacagcagaatcaaagacgaagcaaggcaacctctgtctcctgctatccccagactgacccggcctgagccagctttgcttatgtgataacatcgctaggggcaaagaagagacgtcagggctgggtggtgctggccgagtgagacagagggctgagggacgctgctgagtagagaaaagggagagagataagtggcggagacagaggaggcagggtcagagagcaggaggagaaacccacagttatcactaaacagcaaggtgcagtggggtttgtttgtctgagcttttttttttttctttttttgagacggagccttgctctgtcacccaggctggagtgcagtggtgtcatctcggctcactgcaacctctgcctcctgggttcaagcgattctcctgcctcagcctcccgagtagctggggttacaggcacctgccaccatgtccggctcacttttgtatttttggtagagacggggtttccccatgttggccaggctggtctcgaactcccgtcctcaagtgatccacctgcctcagcctcccaaagtgttgggattacaggcgtgagccaccgcacccggccagggagtggatttcaatggcacgggagagtctcccagggcaaacatcatggaaaaggtggaactagaggaaactcagaaaagctgttggcatttcttaataagatgggggtttccacgtaggagaacagaccagcctggattgtcaggcttagaagtcacaggggacactgggcatggtggcttatgcctgtaatcccagcaccttgggaagccgagcctagaggattgcttgagcccaagagtttgagaccagcctgggcaacataatgagactccatatctacaaaaaataaaatacaaaaattagccaggcatggtggtgctcacctgtagtctcagctactcaggagcctgaggtggcaggatggcctgagcctgggaggtggagactgcagtgagccaagatcacacctctgcactccatccagcctgggtgacagagtgagaccttgtctcaaaaaaaaaaaaaaaaaaaaaaaaagccaggcatggtggctcatgcctgtaatcccagcactttgggaggccgagatgggaggattgcttgaggcaaggagttcgagaccagtctgggcaatatagtgagaccccatctctctaaaaaaaaaaaaaaaaaaatcacaagggaatgacaggggagctggaggtagtctaggttcaaatccccacagtagaagaaatgaacatgaccctaaaagtgtttaccgagaacttagtgtttcccaggcatccatccgcgaaaccagaagaaaggacactgacattaaatcacagcatccacaaatgacgtgagttcaatattttctctgagccacgcccttcccagaagtgaatggctcttcattctcgaggtttctctgtgaagtggtgcgtttcattgacccattttacagtggtggaaactgaggcacaaagaaattacataactcacacaagattgcacagctgggccctgtatgtttccatttgcaatgtgttcaaggacaggcaagaggaattgaggggaaagaagccaaaagagtgttctgaggtggagcgtgatgtctcatgcctgtaatcccagcactttggaaggctaaggcgggcagatcacgaggtcaggagttcgacaccagcctggccaacatagtgaaaccccatccctactaaaaatacaaaaaaaaaaaaaattagctgggcatgatggcgtgcacctgtaatcccagctactcaggaggctgaggcaggagaattgctcgaacccgggaggcggaggctgcagtgagccaagattgcaccattgcactccagcctgggaaacagtgcaagactccacctcaaaaaaaaaaaaaaaaaaaaaaaagggtgttctgaggatgggggcactgtctgtctggaaaaggggtttgaaggagctttctacagcagtggttttcttttcttttttttttttgcgacggagtctcactctgtcgctcaggctggaggcagtggcgtgatcgcagctcactgcaagctctgcctcccgggttcaagtgattctcctgcctcagcctccccagtagctgggactactggcgcctgccaccacacctggctaattttttgtatttttagtagagacagggtttcaccgtgttagccaggatggtcttgatgtcctgacctcgtgatctgcccgcctcggcctcccaaagtcctgggattacaggcgtaagccaccgcacccggccagcagtggttttcaagtgagggcaattgtgcctcccagctgccatttggcaacgtctaaagatgttgttttaactgagagagaaggggtgctactggtgtctaataggtggaggccagagatgctgctaaacatcctacaacacacaggacagccccttacaacaaagtattacccagcttctaatgtcaaaagcgccaaggctgagaaatcctgttctagaaaaaatgggccgcaggtggcttatgtctgtaatcccaggactttgggaggctgaggcaagaggatcacttgagctcaggagttcgagaccagcctgggcaacatagtgagatggccccactaaaaataataaaaaaaaaaattagccaggagtggtggtgcacatctgtcgtgccagctaccctggaggctgagacatgaggactgcttgagcccaggaggttgaggctgaagtaagccatgactgcctcgctgtactccagcctgggtgctagtatgagactccgtttcaaaaaataaaattaaaattaaaaaaaataatagaggaagggaacattttacatcgtggtgtgcaatggttacacatatgtaaaaattcattgacacgcacttaagattcaggcattttgtgcacactttacttgtgtctgttacattgcaacaaaaagttgttttttttttttttttgagacgaagtcttgctctgtcacccaggctggagtgcagtgggccaatctcggctcactgcaacctctgcctcccaggtttaagtgattctcctgtctcaacctcctgagtagctgggattacaagcgtgcgccactatgcctggctagtgtgtgtgtgtgtgtgtgtgtgtgtgtgtgtgtgtgtgtgtttagtagagatggggtttcaccacgttggccaggctggtcttgaactcctgaccttaagtgatccacccgactcagcctcccagagtgctgggattacaggcgtgagccacagtgctcgaccccttctaagtaatgactcggcccactgcctcacctctgttcatgccctcatcctctctctctgcctgccttcccgaaatagcttctttactcatattcatcttctaccaccagctccaccctcctccagttcccctccgcccgcccagccaacagagtgacctttcaaaaatgcaacaccggccatgccccgccccggtccgaattcttcagtgccttctcaccgccctcgggaccaagtccaaacgctgcagcctggcgttgaaggcccaccttgagccgggacccggcctgcattggactaacgtatgacttcgcttctcaccccgaagcctttgcctcggccgttccctgtgccggaattaccctccttccctttacctgattctgtgtcccctaattctctccaggcctcccctacctccctccccagacagaaagcagagctccccgccctgttcccaaagcaccttgtaacttccttgtaaaatcgtttgaccacaggatcgcgtatctgtgttttcatctcttataactctctctagtgtgtgaatatgaagagggtacctgactatgataggtgtgtcacacagacaaaaaaaaaaaagtttgttgaatgatttattcatatattgaccattcaccagggaccaagcgctggggataaagagaaggaacaaggccgggcgcagtggctcacgcctgtaatcccaacactttggacggccaaggggagcagatcacctgaggtcagcagatcgagaccagcctggccagcatggtgaaaccccgtctctactaaagacacaaaaaattagccgggcgtggtggcgcatgcctgtaatcccagctacttgggaggctgaggcaggagaatcacttgaacctggaaggcagaggttgcagtgagccgagatcggcccactgcactccagactgggtgacagagcaaggatctcaaaaaaaaaaaaaagagaagagaagaacaaggccgggtgtggcggctcatgcttgtaatcccaaccctttgggaggttgagactggaggattgcttgagcctgggaggagttcaagaccagcgtgggcaacatagtgagaccccgtttctacaaaaaaaaattttttttttaattaggtgggccgggcatagcagcatggagcccggccgccgcagcacctctgctccgcgatccgtgggcatcctcttcactgtgtccattggatgtttgcctcccagactgagggggagctcagaatgacccaaattctcaaaacaagtttcctcaccgggcgcggtggctcacgcctgtaattccagcactttgggaggcgaagtcgggtgaatcacgaggtcaggagttcaagaccagcctggccaacatggtgaaaccccgtctttactaaaaatacaaaaattagccaggcatggtggcgggcacctgtaatcccagctactcgggagggtgagacagaatcgcttgagcttgggaggcagaggttgcagtgagccgagatggtgccactgcactccagcctgggtgacagagtgagacaacgtcaaaaaaaaaaaaaaaaaggaaaaaaagaaaaaagaaaagtttcctcgagctacagctatcaaagtcactgacatttcaagaggttgtggggtcatgtatgaaattaaaattgaatcagaagaagttaaggaggagagaactattcagcagcaccaaatagtgaatcagtcactacaagaagaaatcaaagtgatgcatggattgcggatatttacctctgtccccaaacgctcagcacaccctggctgcatagatgctgctgcttaagaccttggatgaacttgactgacaccattcttccctaggcatttaccaaaaaatttgtatattttgctcgtatacatttccatattataattatagaagatgtgtaatctatttagatgttaattaaaggaaacaacgaaaaaaaaattagccaggttttgtggtgtgtgcctgtagtcccagctactcggaaggctgaggtgggaggattgcttgagtccaggaaatgaaggttgcagtgatccgagatcgcaccactgcacgccagcctgggcaacagagcaagaccttgtctcaaaggaaaaaaagagaaaaggagagagagagagaggagaacaagattcaggaggctgatgctagaggatctctttgaggccaggagttcaagaccagactgggtagcatcgtgagaccccatctctaaacaaataaaaaacttagccaggtgtggtggcaccagcctgaagtcctagctatttgggaggctgagacaggagaattatttgagcccaggagttcaagaccagcctgggcaacatagtgagatcctgtctctacaaaataaaaaaataaaaaatttagacaggcacagtgttacctgtagtcccagctacttgagaggctgagaaaggaggatcgcttgtgcccaggagttggaagctgcagtgagctatgatcacaccactgcactccagcctgggtgacagggcgagaccccatctcttaaaacaaaacaaacaaaaaaagagagatgaacaaagcagatgccttgtattttctgtacccctttgttttgttttcatttttgttttgagatggagtctcgctccgtcacccaggctggagtgcagtggtgcgattgcagctcactgcaacctccagctcctgggttcaagctattctcctgcctcagcctcactccacttcccaggtatgacaaccagaatgtctccagatattgccaactgtcccctgggggcaaaatctctcctaattgagaaccactgattgatgtcaataccaaagagtctttttttttttttttttttgagacagggtctcactctgccctccaagctacagtgcagtggcatgatctcggctcactgcaacctccgcctcccgggttcaagcaattctcctgcctcagcctcctgagtagctgggattacaggcacccgccaccatgcccaggtaattttttgtgtgtttagtagagacagggtttcaccatgttggccaggctggtctcaaactcctgacctcaggtggtctgccctcttcggcctcccaaagtgctgggattacaagcatgagccgctgtgcccggccaaaagagtctagactaaagaaaagtccggttatcaagaagagacatgacttcaagtatagtccggtggctaaaagctatggctctcagaacagtttattgagcacttaagatgtgtggattttcgtgagtataaattatacctccatataaagggaaaaatagaggaggatagtattctatatctttctgtggtgatgctgatgttctatatcttagtagggatttgggttagacagatgtttgcatttgtccaaacttagccaacgtacacttgaggtctgtgcatttaattgagtataaacttgacctcaaaagataaaattctatacgtgaatactgacctctagttaatgctctgcgtgaagaactttttgtttacttttatatttatttatttatttacttttagagacaaggtcttgctatgttgcccagtctgtggcgtgcagtggcacaatcatagttcactgcacccttgacctcctgggctcaagcaatcctcccatctcagcctcctaagtagctgggactacaagcatgcactaccacgcccagctaattttttacttttttgtagaaataaggtctcgctccattgcccagcctaatctggaactactctcctcctgcttcaccgccgccgcctcttcctcctcctccttctccttcttctccttcttcttctccttctcctcttccttcttttctttcttctttctttctctttctttcttctttctttctttctgtctctctctttctttttctttctttctttctctctttctctttctgaaacctcttcctcttcttccttcttccttccttcctcgtcctcctccttcttctttcttcttttgtgagacagggtctcactctgtcacccgggctctgagtgcagtgacacaatcatagttcactgcatccttgacctcctgggctcaagtgatcctcccaccttgacccccacccaaagtgctgggattacaggcatgagccactgcacctggcctgcaaaattatttctatgtttgaattttttatgataagattttgggggaaatcccttgcatttttgcatgttactgcatacaaattctaatttcaccttcaaaagggggaaaataagagtatacatggctttgaagtcagattcacctgagttcaaatccccaaagggcttcacttctcacatggctatgcccttccttcttctgacctgctttctgtcccatcaacctgggctaatgatttattgaggtggggttttaagcacaagctagggaaccagacacactgggtttaaatcaaagaccattattctaagtgaattaatgcaaaacagaagaccaaataccacgtgttttcacctctaaggagctaaacactgagtacacacagacataaagatgggaatgataggccgggcgcagtggctcacacctgtaatcccagcactttgggaggccaaggccagtggatcacaaagtcaggagtttgagaccagcctggccaacatggtgaaacaccgtctctactaaaaatacaaaacttagctggttgtggtggcgggtgcctgtaatcccagctactcaggaggctgaggcaggagaattgcttgaactcgggaggtggagcttgcagtgagccgagatcgcacactgcactccagcctgggcgacagaggagactccgtctcaaaaaaaaaaaagaaaagaaagaaaaaaaaatgacaactccaccagttcccaggtgtgccgtcttgggcagtgacttcagtgttttgtgcatttgaaatgggtaatgacagcacctactttgcagcattgctgtgaggctgaaatgaggactcccggtgcccttccagcaaagctggtgaagtggcatcaagcatgtttatctgtgagagggtgcgagacacctgcagtcaccctgggggagactttgagagacttcagaaaagcaggagtggggcagggccaaggaaatattttcttgcaattatttgcaattactaaatctgtttgcttttatcctccccaggcaatggaacctgaaaaacagaggtttcaaaggcacatctgggctggcacggtggctcatgcctgtaatcccagcactttggagagccgaggtgggaggatcagtagaacccagaagtttgagaccagcctgggcaacatagcaagacccccatctctacagaaagttaaaaaattagccgggcggccgggtgcggtggctcacacctgtaatttcagcactttgggaggccaaggtggatggatcacaaggtcaggagttcgagaccagcctggccaacatggcaaaaccctgtctctactaaaaatacaaaaattagctgagtgtggtggtatgcacctgtaaacccagcttctcgggaggctgaggcaggagaatcacttgaacccaggaggtggaagttgcagtgagccaagatcatgccactgcattccagcctgggcgacagagtgagactctgtctcaaagaaaaaaaaaaaattagccaagcatgttggtgcacacctgtactatcagctactcatgaggctgaggtgggaagattgtttgagcctaagagttcaaggctgcagtgagccattaccatgcctcacttcagcccgggtgacggggcaagatcttgtccaaaaataatttttctttttaaaaagcacacctgctctttcctgattgtaaatcttaaaagcaggattaagatgcccgccaggacttgctgtggggtctccagccctcagctcaatcccctattatacttattaagtccatctctccatatttactgaattatgtaaagggtagaggcaaagataattatggtctcaagtatgggtgactctgaagccagaagccccatggtttgaattgtgtccccctgaaaaatagacgttgatgtcctaatgcccagtacctctcagaatgtgaccttatttagaaatattggaaacgaggctaccagggtgggctctaatccaataggactggtgtccccttaaaaaggggaaatttgaggccgggtgtggtggctcccgcctgtaatcccagcactttaggaggccgaggtgggtggatcacgaggtcaggagttagagaccagcctggccaacatggtgaaaccccatatctactaaaaatacaaaaattagccaggcgtggtggtacgtgcctatagtcccagctacttggggagggggctgaggcaggagaatcgcttgaacccgggaggcggaggttgcagtgagccaagaccatgccattgcactccagcctgggtgacagagtgagactccatctcaaaaaaaaaaaaaggttggggaggaaatttgggcaccaagacagacatacacagagataagcccatatgaagatgacggcaaagattggagtgaggtatccacaagccaaggaaacttgaagattgtcagcaaataaggccgggcgtggtggatcacacctgtaatctcagcattttgggaggccgaggtgggaggatggctcgaggccaggaggccagcctggctgacatggcaataccccatctctactaaaaatacaaaaattagctgggcatcgtggtgggcacctgcaattccacctactgaggaggctgaggcaggagaatcattgaacctgggaggcagaggttgcagtgagccaagatcgctccactgcactccagctgggcaacagagtgagattctgtctcaaaaaaaaaataaagttagcaaacaaccagacgctgggagagagacataggacagatccttccctccacagccccagaaggaaccaaccctgtccacaccttgatcccggacttctggcttccagaacagtgagacactaaatttctgttgttgaagtcacctagtctgtggtactttgtcactgcagccctaggaaattaaaacacgctgtaaatagcagtaaaggagctggtagtggggcgggagaagagggggcaatgactcagttcacactgtcagatttttgccaggggctgacaggtaccagggaaagtgtcaggtatgaggacgtgacagtgactgagggttacagcccctgcccccagggggctcagagtgacattgccgaggtgggtgatgaataagaaataggtccatgccccttaggtgacaacagtgggttggacccacaaggagggagttgactctaatctggggctccatgcaacctgaggttggatgcctaaaagatgggtagtgttggccaggtggagtggctcatgcctgtaatctcagcactttgggaggccaaggagaggacatcacttgagctcaggagtttgagaccagcctggccaacacggtgaaactccgtctctactaaaaatacaaaaattagccaggcgtggtggcgcgtgcctgtaatcccagctactcagaaggctgaggcaggagaatcacttgagcccaggaggtgaagcttgcagtgagctgaggtctcgccactgcactcctgcctgggcaacagagcaagactctgtctcacaaaattaaaaaaataggccgggcctggtggctcacgcctgtaatcccaacactttgggaggctgaggcgggcagatcacttgaggtcaggagtttgagaccagcctgaccaacatggagaaagcctgtctctactaaaaatacaaaattagccaggcatggtggtgcatgcctgtaatcccagctactctggagtctgaggcaggaaaatcgcttgagccccgggaggcggaggttgcagtgagctgagatcatgccattgcactccagcctgggcaacaagagcgaaactccgtctcaaaaaaaataaatacataaaaataagaaataaagaaataaattacccagtctcaggtatttctttacagcaatgcgagaatggcctaatatgccttgcctccagtgtgggctgaacctaatgactccgttctaaggaacagaaaccggcaaaagcaatggtgtgtcacttttgtgattaggttacaaaagactgcgatttccatctcactgcactccatctagctccttcttggcttgcatgctttgaaaaaacaagtggcctcctgggagaaagccgcgtggcaatgacactgagggttttgtttggttttgttttgttttgttttgttttgtttgagacagagtctcgctctgtcgcccaggctggagtgcagtggtgcgatctccgctcactgcaacctccacctcccaggttcaagtgattcttctgccccagctcccgaacagctgagaccacaggcacgtgccaccacatccggctaattttttctttttgtttgtatgtttgtttgtttttgagacggagttttgctcttgttgcccagactggagtgcaatggcttgatctcagctcactgcaacctccccgtcctgggttcaagccattctcctgcctcagcctcccgagtagctgggattacaggcatgcaccaccacgctcagtaattttgtatttctagtagaggtggggtttctccatgttggtcaggctggtctcaaactcccaacctcaggtgatccacccgcctcgcctcccaaagtgctgggattacaggcctgagccatcacacccggctgacactgagggccttaatctaatagccactgggactaaatcctgccaacagggagcttagatgtcagtcctcccctagctgatccttacagtgaggacagccttggatgacatctggataccagcctaggagagaccttgaggcagaaaacccagcccagagtccaggcccactggaactgtagataataaatgttgttttgagcccattcattttggagtaatttgttacacgatgatagctgatacaaatgccacacaccaactgactcatgtccacttcattgacttccctgtttttgtggaggatggaggccttcacttttccaaataaattttttttatttttacttattattattattattttgagatggagtctcgcactgtcacccgggctagaacgcacgggcgcaatctcggctcactgcaacctccgcctcctaggttcaagtgattctcttgcctcagcctcctgagtagctgggattacaggtgtgtgccaacacacctggctaatttttgtatttttagtagagatggggtttcaccacgttggccaggctggtctcgaactccttacctcatgatccacccacctcagcctctcaaagtgctgcgattacaggcgtgagtcaccgcgcccggccttcttttttttttcaattgttttttcttttatagaggtgaggtcttgctgtgttggccaggctggtcttgaactcttggcctcaagcaatcctcccacctcggcctcccaaagtgtaggattacaggcgtgcaccactgcgcccgaactccaaatgaatttttgttgcttatgtgaagtcacttcaaagaggctcttattgacctctgcagaatcaaagaagttggacttttctgtttggatttcataatagtaagtgaacctgccactgggcattccttttgtttttgttttttgagacagggtctccctctgtcacccaggctggagtgcagtggtgttatcatagctctatgcaacctcgacctcccaggcttaagccatcctcccacctcagcctcatgagtagctgggactacaggtgcaccccaccatgcctggctaatttttgtattttttgaagagatggagttttgccatgttggctaggctggtctccaactcctgggctgaagcaaatcctcctgcctcgccctcctgaagtgctgggattatgggtgtgagccaccacactccacctggacttcttaactaatatctagaagagagctgttacttcggaaaaaaccctcaagcttttttttttttttttttttttgaggcagagtctcgctctgtcacctaggctgaagtgcagtggtgcgatcttggctcactgcaacctccgcctcccaggttcaagcgattctcctgcctcagcctcctgaatagctgggactacaggcgcacaccaccacacccggctaatttttgtatttttagtagagacggagtttcaccatgttggccaggctggtctcgaacgcctgacctcaggtgatctgcctgcctaggcctcccaaagtgctgggattacaggcatgagccagtgcgcctggcaaaaatccacaaactatttcaaggagaggggaaaccaagatgttctgagtgggtagaggaagaaggtgaggatggagctgagctggaccctggatgagggcatttcaggaaaatctgagccccaaaaaatgaccccggtggacacactctccccagtgctgcagacactgcaataaccaaatatctagctagtcatgtgaaatcttcagagttaacaaaaattccctaagatgttgacaatttaattaaaacatttctaatctacttaaaaaaaaaggttaactgacacatattgtatatatttacagagtacaatgtgatattttgatccgtgaacacattgtagacagattaaatcaagctaatttttgtttttgtttttgtttgagaaggagctccgctctgtcacccaggctggagtgcagtgccacgatctcggctcactgcaacctccacctcccgggttcaagagattctcctcctttagcctcctgagtagctgggattacaggcatgcgctaccatgcctggctaatttttttgtacttttggtagagacgggattttgccatgttggcctgtctggtctcaaactcctgaccccagatgatccgcccaccttggcctcccaaagtgctgagattacaggcgtaagccatcgtgcccagccataaatcaagctaattaacatatctatcacatcacctacttagcactttttggggagacgagaatgtttaaaataggctctattaggctggacgaggtggctcatgcctgtaatcctagcgctttgtggggctgaggtgggtggatagcttgagcccaggagtttgagacaagctagggaaacacagtaaaaccccaactctacaaaaaatacaaaaattagcccagcatggtagctcacacctgtaatcccagcactttgggaggccaaggcgggtggatcacctgaggtcgggagttcaagaacagcctgaccaacatggagaaaccctgtctctactaaaaatacaaaattagccaggtgtggtggtgcatacctgttaattccagctactcaggaggctgaggcaggagaatcgcttgaacccaggaggcaaaggttgcggtgaccgagattgcgccattgcactccagcctgggcaataagaatgaaactcaaactcaaaaaaaaaaaaaatacaaaaattagccaggtctggtggcatgcacctgtagtcccagctactcaggaggctgaggcaggaggatcacctgaaccagggagggagaggtagcagtgagctatgatcacaccactgcacaccagcttgggggacagagtgagaccctgtctcaaaaaaaaaaaggctttgttagcaatatttaaatatacatgattgctaactatggccatcatcccatgcagtagatcattaaagtgtgttcctattgactattatttaaaagatacgccgggcacagtggctcacgcctgtaatcccagcactttgggaggctgaggcgggcggatcacgaggtcaggagatcaagaccatcctggctaacacggtgaaaccccacctctactaaaaatacaaaaaattagctgggcgtggtggcaggcgcctgtagtcccagctactccggaagctgaggcaggagaatggcgtgaacccgggaggcggaccttgcagtgagccgagatcgcaccactgcactccagccggggtgacagagagactccgtctcaaaaaaaaaaaaaagacaaaaaaatatttaataacagatgttgatgaaaatgctgagaaaagggaacgcttgtacactgctggtcagagtgtaaattagttcgacctctatggaaaacagtatgaacatttctcaaataggccgggcgcggtggctcacgcctgtaatcccagcactttgggaagccgaggcgggcagatcatgaggtcaggagattgagaccatcctggctaatacagtgaaaccctgtctctactaagaatacaaaaaattagccaggcatggtggtgggcacctgtagtcccagctactcgggaggctgaggcaggagaatggcgtgaacctgggaggcggagcttgcagtgagccgagatcgcgccactgcactcaagcctgggcgacagagtaagattctgtctcaaaaaaaaaaaaaaattctcaaataactaaacaatagaactatcatttgatccagcaatcctactactgggcatatactcaaaaaaaaaaaaaaaaaagaaatcaatatatcaaaaagactcctggctgggcatggtggctaagcatgtaatcccagcactttgagaggccaaggtggacagatcatttgaggtcaggagtttgagactagcctggccaacatggtgaaatcccatctctaatataaaatacaaaaattagccaggcgtggtggcaggtgcctgtaatcccagctactcagaagacagaggcacaagaattgcttgaacccgggagatggaggttgcagtgagctgagatcacgccatgcactccagcctgggtaatagagcaagactctgtctcaaaacagacaaacaaacaaacaaacaaacagatacctgcacttgtaggtttatcacagcactactcgcaatagcaaagataagaaatcagcctaaatgtccatccacagaggactggctaaagaaaatgtggtacatatacacagcgcaataccacacagccataaaaaaaaatctttgagccgtgaaatcatgtcttttgctgcaacagggatggaactggaggtcattatcttaagtgaaacaggtcagacacacagtcaaatattgcatgttcttactcatacatgggtgctaaaaaatgtgttcatgtggatgtagagagtggaatgacagagcagatgtggtagggtgatgagaaattacttaatggctatgatgtaccttattggggtgatggataccccaaaagccctgacttcaccactatacaatttatgcatgtaacaaaattacataccctctctagatttatttatgtatttacttattgagacagagtttcactctccttgcccaggctggagtgcaatggcatgatcttggctcactgcaacctccacctgtaatcctagcactttgggaggccaaggggagcagatcacctgaggttgggcgttcgggaccagcctgaccaacatggagaaactccatttctactaaaaatacaaaattagccaggcatggtcatgcatgcctgtaatcccagctacttgggaggctgaggcaggagaaacgcttcaacccggaaggcagaggttgcggtgagccaagatctcaccattgtactccagcctaggcaacaagagtgaaactctgtctcaaaaaaaaaaaaaaaaagagatggggtcttgctatgttgcccaggctggagtgcagtggctatccacaagcaatcatcacaaactacagcctctaacttctgagctcaagtgattctcccacctcagcttccaaagtagctaagactacaggcacatgccacgacctgcagctgcatagacttttttacaacctttatcttcttgattttctgccttggcaagggcagaagccctgaccacattgtttactgtacatcccatggtgtttgacacaggtgttaccacccagcaggtgctcaataaatatttgccaaacaagcgaaggaatgaatgaaggaagttagtgtccacaagacaggtctgcttcactctttgagttcggaaacaaagcagatgacaggagctggtggcacgtacactcccaaatgtccagtgccaacaccttgccctgctcttactggctggccaggtgggagctgactcgtacttcctccagctccccagcagaagctgtatggcacttcccagctgctgggaggaccccttctcattgcacagttggcctcatgacagcctcgccctactgctcttcatggtctcctgggcacacctgtggtgttagccagctcaggtaacatcatgaccagctgctaatctcaagtgttcacagaagcagctgagaaggacagcaaggaagcgttcccgtgaggccagactgggaaagcccagaaggctgaggtgcactgagctctcctgaaatatgtaaagagcacatttggctctaggaggtagtgacttagagggtcttcagcaaatgacttaaaagaggcatcctctacctgatgctttcagtgagccaggcattgtgttaagtgtttgctttgtgctatctctctgtctcctttttttagatggagtttcgctcttgttgcccaggctggagtacaatggtatgatcttggctcactgcaacctctgcctcctggggtcaagcgattctcctgcctcagcctcctgagtagctaggattacaggcgtgtgccaccacgccctgctaatttttgcatttttagtagagatggagtttctccgtgttggtcaggctggtctcgaactcctgacctcaggtgatccgcccacttcggcctcccaaagtgctgggattataggcatgagccaccgcgcccggcctcttttttttttttttttgaaacagggtcttgctctgtcacccaggctggagtggagtgtagtgacgcgatcttggctcactgcaacctctgcctcccaggctcaacccatcctcccaagtagctggaactacaggaaccctccaccaagcctggctaatttttttgtagagatggggttttaccattttgcccagggtggtcttgaactcctgggctcaggcaatctgccttggcctcccaaagcactgggattacaggtgtgagccaccatacctggccaatgtgctatatcattaaatgctcttagagccacattgaacagatgagctgctgagaaccaatgggttcagcaatgtgttcacaaccaagggttcaaatccagaactctgaagtcagagatgtacaagaataaccactggcctccctgtccctccctaccttacatgtgccttgctctgggacagaccctggaaacgctctaaagcagctcttatggtggaaatgcaacgcaagccatatatgtgttttaaaactttctagcagcccctccccacacacacacataaaaagaaacaaatgaaaatcacgttaataatatattcctggccaagtgtgatggtacacacctgtcatcccagctacttgggaagctgaggcaggagaatcacttgaacctgggaggcggaggttgcagtgagccgagatggcgccactgcactccagcctgggcaacacagagagactctgtctcaaaaaataaataaataaaataaaataaaaaataatatattccaggtcttggcaaactttcagtaagggcccagagtgagtatcttagttttcacaggccatgagaaccctgctctgtcttcctcttttgttgttgttgatttccccaatccttcaaacatgtaaaaaccatcctatttttttttttctaagacagagtctcactctgtcacccaggctggagtgcagtggcgtgatctcagctcactgcaatctctgcctcgcaggttcgagtgattctcctgtctcagcctcctgagtagctgggattacaagcgcccgccaccaagcccagctaattttttgtattttagtagagatggggtttcactatgttggccaggctggtctcaaactcctgacctcaagtgatccacctgcctcagcctcccaaagtgctgggattacaggcgtgagccactgcacccggccagtaaaaaccatccttagcttgagatctggacaaaaaagaactacaggctttgtccatgactggaaggactcaagaaacaaatagtaattcattttaaaaataattgaaggagggccaggtgtggcagctcacgcctgtaatcccagcactttgggaggctgaggtgggcagatcacctaaggtcaggagttcgagaccttcctggccaatatggtgaaacttcatctttactaaaaatacaaaaattagccgggcgtgttggcaggtgcctgtaatcttagctacttgggaggctgaggctggagaatcgctggaacctgggaggcggaggttgcagtgagcccagatcatgccactgtgctccagcctgggtggagcaagacagagcaagatctggtctcgaaaaataaataagtaaataaataaataaaataattgaaggaggagaagaagggggaggagaaaggggaagaagagaaaagaacgaggggaagaaaggaggcggagggtcagggagaaaaggagagggaagcaggaggagaagaaaaggaggaagaaagaaagaggaggttggggccgggtgcagtggctcacgcctgtaatcccagcactttcggaggccgatgcaggaagatcatgaggtcaagagatcaagaccatcctggccaatatggtgaaaccccgtctctactaaaaatacaatcattagctgggcatgatggtgcatgcctgtagtcccagctactcaggaggctgagacaggagaatcgcttgaacctggaaggcaggggttgcagtgaactgagatcctgccactgcactccagcctagcaacagagcaagactctgtctcaaaaaaaaccaaaaaaacaaaaagaggttggaaggagggagaagaaacatctactaaacccttacatcatgtggacgccatctttgctgggtaactcctcactgcagcttaaatttcactagcagagaaactcctgattccctcccctaggttcaccctacctgcctgaatgctacatacttcccccatcctccacatcatcctgttttattgtgatactttgtttcaaacttgtcttcactagttgactctaaactgcgtgaagctgcaaccaatttgcccatcctctggcatcaggcacagtttcaacgtctactagaccaataaagaatcaaagacatttaaacactggcagggccaatgtctagttagaagattaaaaaggcaaggacttactgtctccggtcctggtgtgggaatgtggctggtgcctcagccctgagtgtgcaggatgtgactgctcagtgggcacgggatacactgggatcctggggcctccagggtcccatccctggcctctggcgtccagcctccaggaagtcataggaccctctggcctcgcaggtgaccttgaaggaactgggctgaatgctgcccttctgatcagctttctcttgtttggctgcctcttggtgtccacagaagcatcattcatgttcctgactctggacagtgagcgtgtccccagggttctcccacaggagatgggcatatcagggcacaggtcttctgcagaaggctgagatgtgggtacatggtgaccacccaggatttctgtggctgcaaccaggcttagcagggctctggtgtccagatgagtaattcctcctggggagaggagagagaggagacaggatcagtgttacctcttcagtgatttagaaaactcagagccataagtatacttcagaagaggcaatcctctataagtgctccctgaataagaccccaaattgcaaacaaaccttgcaaacaaagagctagtctaggccgggcgcggtggctcacccctgtaatcccagcactttgggaggccgaggcgggtggatcacctgaggtcaggagctcgagaccagcctggccaacatggtgaaaccccccttctactaaaaatacaaaaattagctgggcatggtagtgggtacctgtaatctcagctactcaggaggttgaggcaagagaatgacttgaactcgggagaaggaagttgcagtgagctgagatcgtgccattgcattccagcctgggtgacaagagcaaaactccatcccaaacaaaaaaaagagctagtctagtgctaatctgtccaattctggaagctacaataataaaaattgaaaatagcagtcctactatttatggagtcaccagtgtatgccagcattgaccatgcttcctcccaatctttttgacaactcttgtcaatattggtaaagtttatagcagtatccctcaaggtttgattcacataggaatcatttgttaaaatgcagtttctgatacggaagatcctgcggagattcttcatgtctaacaagaccccaggtgaccattctgcttcacttcacagacctcgcagagagttcaagtggatgtatttgggcaaactgagcatttagtgactatttgctggatgaatgaatggatgggtggatgagtggacagacgatagatggatgtatgagcagatagatggattgatgagtggatggatgggtgggtgggtggatgggtggaggaatgaatgggtgaatagatggatgaatagaagatggatggattaatgaaagatggctgcatggatggaagaaggggttggtgggtgagtgcatgaatggatagatggatgagtggatgaatgcatggatgagtggatgaatgaatggatcggtgaatggatgaatgggtgggtgggtggatgcaggaatgagtgggtgaatagatgaatagaagatggatagatgaatgaaagatagtcatctttattaaatatcggatgaatgaaagaggcaagttcccccataagcctctgaaatgtggttattagaaaataattgtgtcctggaagccagctcagggccaggcacatcataggttcttagaaataaacaagcaccttggcacttgaaaaaaatgtccaaggcatgaaggttattctcacatttttctcttctctcctaaagcaagttgtaagactctcatgtgagagcagccctccctatcccgggaggagaggaacatcttatctctgaagacacaggacacagagaagaatctgaacaaacaggcctggctaagttcccccagtttactggcagaagatcctttctttttttttttttttttgtttaacccaatcctacttctctatgactatccacctctttatcagacctagcataaaaaattacacaggttggccaggcgcggtgactcacctgtaattccagcattttgggaggccaaggcaggtggatcatttgaggtcaggagtttgagaccagcctggccaacatggtgaaaccccatctctactaaaaatacacaaattagtcagtgattacaggcatctcagcccttttagatcatgctcaccaagcatcctccctggccactgcatggtttcaataacctcccacgcacttgtaacatccaaacctataactccagccccgctccagaatcaaatactcagctaccctgtggagatagctgaccgactccaagcctaatatgggtgtgacagagccgatcactgctctaggtgccgcttttcctctcttgctgaatgattccaacatccacttatttgccccaaactcctagagattactccatcttcttccctcatcctcagccccaaatactatatttccttcatataacacctgctgtcatttacggtaatcactaactggagcccctaccccccaataaccttagagctctgcaaacaaacagatgtggggaaccagactacgccaccccaaaatatgcccctttagcataaggactgttgaactgaaggcaattaagaagtgggcatgggctggacgcagtggctcatgcctgtaatcccagcactttgggaagccaagagggtggatcacttgaggtcaggagttcgagaccagcctggccaacatggtgaaaccccgtctctactaataatataaaaattagccaggcatggtggtaggctcctataatcccagctactcgggaggttgaggcacaagaattccttaaacccgggaggtgggagttgtagtgagccaagactgcaccatggcactccaggctagagtgagactctttctcaagagaaaaaaaaaagtgggtgcagaaaggctctctatcctctttccatttgcccaaaagcaaatagagacacaggacagagagctgactgtacttggaaattgctaagagagtagattttgggggttctcaaaaaaaagtatgggaagtaatatatatgttttgttttgttttgttttgtttttgagatggagtctcaccctgttgcccaggctggagtgcagtggcacgatctcggctcactgcaacctccgtctcctgggttcaaacgattctcctgcctcagcctcctgagtagctgggattataggcacccgccaccatgcccggctaatttttgtatttttagtagagacaaggtttcatcatgttggccaagctggtctcaatctcccgaccttgtgatctatccgtcttggcttcccaaagtgctgggattacaggcgtaagccaccgtgcccagccagtaatatgtatgttaattagctcaatttactcagtccacaatgtatacaaatttcaaaacatcatcttgtatatcataaatatatacaatgctttgtcaatgtaaaaaatgaaaaagtgccgggcacagtggctcacgcctgtaatcccagcactttgggaggccaaggcgagcagaccgtttgaggtcaggagttggagaccagcatggccaacatagtgaaaccccgtctctactaaaaatataaaaattagccaggcatggtggtgagcgcctgtaatcccagctactcgggaggctgaggcaggagaattgcttgaacccaggaagcggaggctgcagtgagcccagatcatgccaccgcactccagcataggcgatagagcaagactttgtctcaaaactaaaacaacaacaataacaaaacgaacacaaaagaaaccaacgaaaccctaactcaatgcactccaacctgggcgacagagcgagactccatcttaaaaaataataaataaatacaaaattcaaaattacacacctggctcacatatttccacactgggtactgctatcttgtaagtatccacattttacaaagaataagattgaagacacagagaggctaagctcccagtgtaacacagctgattagtagcacagctgagacttaaacccagaccacgtggtttcaaagtcagaggacctagccactaggctacactgctgaatgctgttgcctccatatgcttcatccattattgtgggaaggggtaactgaggatcagatacctgctccccaaggaagccctttcacctcgattgtccaccctggacaggagttgagcaacatgtttggacttgtctgcctctcccctgcagattctcaaccagggctgatgtcaatcttcttcattcacatcacacaagcaaaaggaaactatttgtgagtgtcaggtggaagaaaaagtaaggtgtggaacaaaaaacaattgtatttctggatggttgcgtttcaaataaacgaaactcactctctgtgagtgtggcccgagggacagaaccagggtcaccacccggcttccagaaacacctatttccagcagaagcgccctcaacggatcagggtcactgggattcaagacctggccccttcctaggactttaggggctggcctcccagggagaagatagaagaggaaggtgagctcttttctttgtctttttttagaacacttctatctggagccacacgcccctgtcactaacgccacaccgacccacagtcagagttactcatggtcagactcaccctaaacctatcctacacgcccagatgcagccattcccaagcccttacccaccgctggtatgctccctcagggacgtgcagcctcagagatatacttcaacagcatcttcacacaaccccccgaccctctgagacccacctgcttacaaacatacaaccagttatttggccctacaacagcatcattttcttttctttccttttcttttaatttaataattgcaagggagcttcgtagttctgtttctggtcacatattcccttgcaaatcatgccataaaggctgggtgcggtggctcacgcctgtaatcccagcattttgggaggctgaggcaggtggatcacgaggtcaggagttcaagaccagcctggccaacaaggtgaaaccccgtctctactaaaaactacaaaaaaattagctgggtgcggtggcaggtgcctgtaatcccagctactcaggaggctgaggaaggagaatcgcttgaacctggatggcagaggttgcagtgagctgagattgtgccaccgcattccagcctgggcaacaagagtgaaactgtctcaaaaaaaaaaaaaagaaagaaagaaagaaaaaagaaaaagaaaaggagaaagaaaatcatgctgtcgtcatgcctgtaaccctgcactttgagaggtcgaggcgggtggatcgcttgagcacaggggttcgagaccagcccaggcaacatatggagaccttgtctatacaaaaatacaaaaattatctgggggtggtgtcgcgtgcctgtagtcccagctactcaagaggctgaggcaggaggatcgcttgaggtcaggaggtccaggctgcagtgagctgagatcacaccaccgcactctagcttgagtgacagcctctcgagtagctgggactacagttgcgtaacaccacacccagctaatttttctatttttgtagagacggggtctccccatgttgcccaggctggtcttgaactcctgggttcaagcaatccactctccttggcctcccaaagtgctgggattacaggtctgaggatggcatcaagggaatacatgactagaaacagacctccaaacctcccttgcaatgattaaatctaccctccacattgcaagtcacccctttataggataaaagctttaaggaaacatgaccgggcgcggtggctcacacctgaaatcccagcacttagggaggtcaaggtgggtggatcacctgaggtcaggagtttgagaccagcctagccaacatgatgaaaccccacctctattaaaaataaaaaacttaggcaggcatggtggcacacacctgtagtcccagctactcaggaggctaaggcaggagaatcgcttgaacccgggaggcggaggttgcagtgagccgagttagtgccatgcactccagcctgggcaacagagcaagactccgtctcaaaaataaaaacaaaacaaaaaacaagaaacatttattttctcacataattcgtgtgagccaggagttgaagggcagcttagatgggtgcttagtggctttcaagaggttgaagtcaaatgtcctctggggctgcagtcatctgaaggcttgatgtgggctggaggatccagttccaaggtggctcattcatttgcttggcaaattagtgctggttgtgggcagaaaacctcagttcattgccatgtaggcctctctatagagctgcttgagtatcctggtgacaatatggaagcagtcatgtcttttatgatgtaaattagtgccaggagctgggcacggtggctcactcctgtaatcccagcactttgggaaaccgaggcgggcagattgcttgagttggagacaagcttgggcaacatggcgaaaccccacccctacaaaagatacaaacattagccaggcttggtggcgtgcacctgtagtcccagctactctggaggctgaggcaggaggattacctgggaacctgggaggcggaggttgcagtgagccaagatcccagcactacactccagcctgggtgacagagggagacttcatctcaatcgatcaataaataaattaggtacaggtgtggacgatggtcctcaggtattataccttaaacaccttgagtacgacttctcttgatctaaagaccaataaatttgccttcactcactcttctttctttttgaagttccgggcttctctttgatatcatttcccttcagcctcaataactctctttactgtttcttttagagcaattctgttgatgatgacttcttttcattttcttttacctatttattttactattgttcctcctagatattttcactggtatagaattcttagtgaatcgtcatgttctctcagcattttagaaacattgttccattgtgttctagagtccatggtttccagtgagaaatccagtcattcaaatcattgtttgctagagggtgtttggtgtttggtgtttttcttttttttaagagatggggtctcgctatgttgcccaggctggactcaaactcttgggctcaagcgatcctcctatctcagctacccaaatagctgaaactacggacatgtactgcgttattaattcaagcctctgcattttggggtcgtttcttctataacaatagataactgggacaggcgcagtggctcacgcctgtaatcccaacactttgggatgccaaggtaggcagatcgcctgaggtcgggagttcaagaagagcctgaccaacatggagaaaccccatctctactaaaaatataaaattaactgggcatggtggtgcatgcctgtaatcccagcactttgggaggccacggccggtggatcacctgaggtcaggagttccagactagcctggccaacctggtgaaaccccgtctctactaaaaatacaaaaattagctgggcgtggtggcaggtgcctgtaatcccagctattctggaagctgaggcaggagaatcacttgaacctgggaggcagaggttgcagtgagctgagatcgcaccactgcactccagcctgggcgacagtgagactccatctcaaaaaaaaaaaaaaaaaaaaaagtgtggggattacaggcagagccaccatgcctgctgtctgtgtctgttttgttgagccaccaacaggctgttaacttgagtacatttcttctgctctctgacttagtgtactcatctggaaaatgggggtgaatgtgctcccacactgctgagctgtagagggccttaaatgagttaatctctccctgaaatctctctgtgaatggcccaaccgtaatcagattccgtaaagggtagctgtggtcattcttcttttttccctcctcccctcttccactcattctggtgacccaagatttcccagttctttacctatgactcaccccacctcagagctttttctttttctttttttcttgagatggagtcttgctctgtcacccaagctggagtgcggtggtgtcatctctgctcactgcaacctccgcctcccaggttcaagcaattctcctatctcagcctccagaacagctgggattacagatgcacaccagcacgcctggctaatttttgtatttttagtagagacagagttttaccatgttggccaggctggtctcgaactcctgacctcaagtgattggcccaccttgacctccgaaactgagctttttttttcccttccttttttttttgagacagagtctcactctgtcgcccaggctggagtgcagtggcgcaatctcggctcactgcaacgtctgcctcccgggttcaagagattcacctgcctcagcctcccaggtagctgggattacaggcgagcaccaccacgcctggctaatttttgtattttagtagagacagggtttcaccatgttggccaggctggtctggaactcctgacctcaagtgatctgcccgccttggcctcccaaagtgttgggaatacagacgtgagccaccacgcccggcccagaactttttcttacaggcctcttggaccacctgacccagatacaggacatttcctacaactccagaggaaaatccccttcttccttcctctacggaagtgaccgagagaaagtaacactcactgtttcctctcttccagacccttctgaaaattctaattccagaaagctcatcttataaaccaaaaataaaattctaagccccctaaccgacttcatagacccctcttttggccaagaggatcccaaaggaacctgaaaaactagttcagcccatgataaggagaggatttggacatccctcattgtacccctccctttggagtttaagcacaactgactagcattaacattaaaacagaggcccagagagttggccaatatattgtctttttgtttgtttgtttttgagacagagtttcgctcttgttgcccaggctgaagtgcagtgatgcgatctcagctcactgcaacctccacctcccagatgcaagtgattctcctgcttcagcctcccaagtagctggaatcacaggcacgcaccaccacgcccggctaattttgtatttttagtagagacggggtttcaccatgttggccaggctggtctcaaactcctgacctcacgtgatccacccaccttggcctcccaaagtgctgggattacatgtgtgagccaccatgcctttttgcctttctaacggagcccctggcaaattcaaaaactgttttgctctctgtctgcaagtctccctggcagatccctcagttatattcgtacccaccccttgaatgctgtggcttccagagatccaccggaacaccaaagacttccattctcaaccacctgaatctccggaatcccctgcacccacctcctctcccagtgtttcacgaatcagctaatccttcaaggtctttaaaatgtatccacgtcttcctcctggattattgcctcctgatagcctctctgatttctttccaccttgtgccctaacagtctgctctttgtacagcagccagaaggaggctgtgaaaaataagagtcaaagcatgggctgggcgtggtggctcatgcctgtaatcccagcactttgggaggccatggcaagaggactgcttaggcccaggagttcaagataaacttaggcaacatagcgagaccctgtctctacaaaaaaaaaaaaaattaaaataggccaggcgcagtggctcatgcctataatcctagcactatgggaagcagaggcaggcagatcacctgagttcaggagttcaagaccagcctggccaccatggtgaaactttgtctctacaaaaatacaaaaattagctgggcatgatgacgggtgcctgtaatcccagctactcaggaggctgaggcaggaaaatcacttaaacccaagaggtggaggttgcagtgagctgagatcatgccattgaactctagcctgggcaacagagcaagactccatctcaaaaataaaataaaataaaaaatgagccaggtatggtagtgcacacctgtagtcccaggtacttgggaaactgaggcaggaggatcacttgagcccaggaggttgaggttgcagtgagctgtgatcagccactgcactgcagcctggggcacagagcaagaccctgtccaaaaaaaaagaaaaagaaaatgatagaccagagcttaatgtctttccatggttctgcatatatgtcagagtcaaaactaaattccctccaaggacctattggtttgtccctgcccttatgtccctccccagattccttctctcccacctcgttcactctgtttcagctgctctggtttacttgctgtttctcaaactcactcctgcctcaagtcccttgcatttcctggaacatccttccacctacccaaatacctaaatagttccatcctcacttcattaagtcctctgctcagatgtcacctcttcaaagactgtgctacctcacccctgaaccctgacacccactacctctcttgacattgtaggtgctcagtaatgtttgtgggatgaaaacatgatggaaaagagcttctgctcaaagctttttctccttttttctttctctccttccttccttctttccttccttcctgttttttttttttctttttctttttttttttttgatacatagtctcgctctgtcacctaggctggagtgcaacggcgcgatcttggctcactgcaacctccgcctcctgggttcaagcgattctcgtgcctcagcctcctgagtagctgggattgcaggtgcccgccaccatgcccggctaatttgttgtatttttagtagagacggggtttcaccatgttggtcaggctggtctcaaactcctgacctcaggtgattcatcctcctcggcctcccaaagtgctgggattgcaggcatgagccaccacgcctggcccttccttccttcattccttccttcctccctcccttccttctttctttctctttctttcatcttccttccttctctttctttctccctttctgcttccttccttcttttccgtccttccttctctttctttttctctttctccttccttccttccttcctccctgcctccctccctccctctttttctctctctttctctctttctttcttccttgttttgccatgttgcccaggctgctcttgaacttctgggctcaagggatcctcccagctcagcctcccaagtagctaagactataggcacgtacaaccatgcctagctaatgttttgtatttttagtagaaatggggttttcccatgttgcccaggctggtcttgagctcctggactcctggactcaagtactcttcccacctctgcctccaaaagtgctagggttacaggtgagagccactgcgcctggccctctctctctcatctcagatttttctctccaccttagccactcccagatgttctcctcactcctgtctccttccgttgaaaaaccaccctcaagctactggtggatgaagggtgtggaccaccccacccctggatcaaacccccaagccccacctctatcacccacagctatatttccttgagcaagttgcttaatctctccaagcctcagtttcctcaactacaaaacatatacaaatagaaagtgatacatgactgcttcattgtagtaaccattgcaccatctgcatgtatcccacaatgtcatgtagcaaacaacaaaaattattaaaaagaaaaaaagacgatctgatctcacagatctgttaagaggattaaatgggattattcatgtaaagctctccatttgtgatgtcatagtgtaaatatcaaattaacggtggaacgagctgttgtaatcaattcttatctaaatacgaccaataataacaatgcttaatgtgattattactaaccatagttgtatttcctcttatattaacctcttagtctctccttaccatattatagatcatcaataaatatttattgaatgaacgattgaatgaatggttattgaatttttgtaaggaggaaaagatcacggacttcttataaaaaatataaaagtcagtccagatgcgatggctcatgcctgtaatccagcactttgggaggccgaggtgggctgatcacttaaggtcaggagttcgagaccagcctggccaacatggtgaaaccctatctctaccaaaaaaaaaattagccaggtgtggtggtgtgcacctgtaatcccagctactcgggaggctggggcaggagaatcacttgaacccaggaggcagaggttgcagtgagccgagatcatgccactgcactccagcctgggcaacagagtgaaactccgtctcaaaaaaaaagaaaaagaaaagtataaaagccaggtctgtggccaggcacaatggctcaacacctgtaatcccaagactttcagaggccaaggcgggcagataacttgaggtgaggagtttgagaccagcctggccaacacggtgaaaccctatctctactaaaaatacaaaaaattaggccaggcttggtggctcgtgcctgtaatcccagcactttttggggccgaggcaggtagatcacgaggtcacgagctcaagagatggagacaatcctggccaacatggtgaaaccctgtctctcctaaaaatacaaaaattagctgggtgtggtggcgcgcctgtagtcccagctacgtgggaggctgaggcaggagaatggcttgaacccaggaggcggaggttgcagtgagccgagatcacaccacttgcactccagcctggtgacagaacaagacttcgtctcaaaaaaaaaagaaaaattagccaggcatggtggtatgtgcttgtaatcccagctactagggaggctgaggcaagagagtcgtttgaacccaggatgcagaggttgtatgagctgagatcacaccactgcactccagcctggaggacagagtgagactctgtctcaaaaagaaaaaagaaacaaacacaactgggtcaggcaaggtggctcacacctataatcccagcactttgggaggctgagatgggaggattgcttgaggccaggagtttgagacccacctgggcaacatggtgagaccccaatttctactaaaagtataaaaattagtgccgggcacagtggctcatgcttataatcccagcactttgggaggccaaggtgggcaggtcacctgaggtcatgaattcgagaccagcctgaccaaaatgatgaaaccctgattctactataaatacaaaaattagccgggcgtggtggcactcgcctgtaatcccagctacttgggagactgagacaggagaatcacttgaacccgggaggtggaggttgcagtgagccgagatcgcgccattgcactccaggctgggcaacaagagcgaaactccatctcaaaaaaaaaaaaaaaattagccaggtggcagggcacagtggctcacgcctgtaatcccagcactttgggaggccaaggcaggcagatcacaagatcaggtgtttgggaccagcctggccaacacggtgaaatcccatctctactaaaaatacaaaaattagttggacgtgttggcgggcgcctgtaatcccagctactcgggaggctgaggcaggagaattgcttgaacccgggaggtggagtttgcagtgagccgagatcacgccactgccctccagcctgggtgacagagtgagattccatctcaaaaaaaaaaaaaattagctgggcatggtggtgcgtgcccatagtctcagctccttgggaggttaaggcacgagaatcgctggaacccaggaggaggaggttgcagtgagccaagatcgtgccactacactccagcctggctaagagagagactctgtctcaaaaataaaaacaaaagagttattggcctggcgtggtggctcacgcctgaaatcccaacactttgagaggccaaagcaggtggatcggatcatctgaggtcaggagtcagagaccagcctggccaacatggcaaaaccccatctctactaaaaaaatgcaaaaaatagccaggcgtggtggtgcgtgcctgtaatcccagctacttgggaagctgaggcaggagaattccttgaacccgggaggtggaggttgcagggagctgagatcgtgccactgcactccagcttgggtgaaagagctagactctgtctcaaaaaaaaaagaaaaaggttcttgtaaggactctgtgagatggaccacaggcatgggtctcggcacaatctgtttgtttgtttgtttgtttgtttgtttgtttgttacggagtctcgctttaccccccaggctggagtgcagtggtacgatctcggctctctgccacctctgcctcccgggttcaagtgtttctcctgcctcagcctcccaagtagctgggattacagacacccaccaccacgcccggctaatttttgtttttttagtagagacagggttttgccatgtttcccgggctggtctccaactcctgacctcaagtgatccgcccacctcggcctcccaaagggctaggattacagaagtaagccagtgcacctggccagcacaatcgttcttgctccctagatgtgaactgctgttttcaccagcaggagctaaggggcaggctgtctcagattagatgctttttagagcactctgtagttccttaaatggagctgcaaatccacaggttgctgctcaatgtctgactagcttctactttatttctgactttatttctcatctgtctccaccacacccctcccttccacataccctgcattccagcaaaactgaccaatgcatcacatgccagacacaccctgtgatgtctaccccaggacccttgcacaggcttctgcctcaagagagctcatgatccagtggacaggcgtgggcattggaatctcacaagcccagatcacctcccagtttcacctcttcaatgctattgacctttggggactgacaaaacctctctgaacttcagtttgcccagatatagcatggactgaaaaaatgtgtaccttctaggtacaagtcatgcctcactcagcaacggggatatatcctgagaaatgcatcactaggcaattttgtcattgtgcaaataccatagagtgtacttatacaaacctacatggtatagcaactacacacccaggctgtagggtatgacctctagattttacatatatatatatatatatatatatatatatatatatatatatatatatataaatatatatattttttttttccagatggagttttgctctttcgcccaggctgcagtgaagtggcacaatctcagctcactgcaactgctgcccccaggttcaagtgattctcctgcctcagtctccccagtagctgggattacaggcacctggcacctcacccggctaattttgtacttttagtagagatggcgtttcaccacgttggccaggctggtctcgaactcctgatctcaggtgatccacccgcctcagcctcccaaattgctaggattataggtgtgagccactgcgcccagccttaaaatttatattttaacttaaaatatatttacaactagagatgggtctcactatgttgcccaggctagtcttgaagtcctgggctcaagtgatcctctcaccttggcctcccaaagtcctgggattatggatatgagccactgcaccaggccaatgataagcgtttgtgtatctacatgtatttaaacatagagaaaggacagtaaaaatacagtattacaatctcttgggaccactgtcatatatgcagtctgtcattgactgaaatgttgttatacagcacataattgtactgaatgaggattaaagctaatgggacatttagccaggtgcagtggctcacgcctgtaatcccagcacttgggaggccgaggtgagcagatcacctgaggtcaggagttcgaggccagcctggacaacatgttgaaacccctgtctctactaaaaatacaaaaattagccgggcgttgtggcaggcgccaactactcgggaggctgaggcaggagaatcagttgaactcaggaagcagaggttgcagtgagcagagatagcaccactgtaatccagcctgggcaatagagtgagatgctgtctcagaaataaataaataaataaataagtcgggcgaggtggcttacgcctgtaatcacagcaccttgggaggccaaggtgggtggatcacgaggttaggagttcaagacccgtctggccaagatggtgaaaccccatctgtactaaaaatacaaaaattagccggacatggtggcaggtgcctgtaatcccagctacccaggaggctgaggcagagaattacttgaacccagtaggtggaggttgcagtgagccgagattgtgccactgcactccagctttggcgacaaagtgagactctgtctcaaaaaaaaatatatatatatatttatatatatatatacacacacacatatatacttacaatacataataatattaataacatgatataaatattaacaacttagtataatgatagtaaggatttaccatgtcaggcatctttccaaaaactcttaatatattaaatcatagaattctcacaacaacttttttttttttcaaacggggtctcactctgtcacccaggctggagtacagtggtgcgatcttggttcactgcaaccactaactcctgagttcaagcgattctcctacctcagccccctgagtagctgggactacaggagtgcactaccatgcccagctagtttttgtgttttaagtagagacagggtttcaccatgttggccaggctggtctcaaactcctgatctcaagtgatctgcccgcctcgacctcccaacgtgctgagattacaggcacctggcaccgtgcccagctcgtttttgcatttttagtagcgatggggtttcaccatattggccaggctggtctcgaactcctgacctcaagtgatctacctgccttggcctcccaaagtgctgggattacaggcattatctactgcaccaggccctcacaacaacattttgatagtactattattaagctcatttcacagatgaggaacctgagagaggtaaggagaagtacaataatctgcctaaggtcgtcgtggagctactaattggctaagcagctcctggaagtctcgctagagagtgtcactgtttaatggaccgttggacatttcctaagccttgggtgtgttttacatcattcactagccatgcacagctagtgagctcttgcaatgcagctactggggctaccacagttgtagccataatgctatgtactatgggtgaggaacttaattttttttttttaatttgtattagccaagcatggtgatgtgcacctgtagttccagctactcgggaggctgagatgggaagatcgcttgagcctaggaggtggaggctgcagtgagctgtatttgtgccattgcactccagcccgggtgacacaatgagatcccatctcaaaacaaaaaccaggtcataggtagataaagagacaaaaggttgccttcttttgagtttctgatgagcctctccaaaggagccaatcagatatgaatgtatctaagtgagcacaggagggactctgaatagaatgagaggcaggttggccctgagcagttcccagcttgacttttcgctctagcttaatgattttgagaggtgaagcccgctgggcttctgggtcaggtggggacttggagaacttttctatttagctaaaggattgtaaacgcaccaatcagcattctgtgtctagctaaaggtttgtaaatgcaccaatcaggactctgtaaaaacacaccaatcagcgctctgtgtctagctaaaggtttgtaaacgcaccaatcagccctctgtaaaaacatacctatccgcgctctgtaaaaacggaccaatcagccctctgtaaaatggaccaatcagcgatctgtaaaatggaccaatcagcaggaagtggttggggccaaataaggtaataaaagctggccatctgaaccagcagtgccaacctgctcatgtccccttccacattgtggaagttttgttcttttgttcttcataataaatcttcctgctgctcactctttgagcccacactacttttatgagctgttaacactcactgtgaaggtctacagcttcactcctgaagtcagccagaccaggaacccactggaaggaagaaactccggacacatctgaacatctgaaggaacgaactcgggacacaccatctttaagaactgtaacactcactgcaacggtctgcggtttcattcttgaagtcagcaagaccaagaacccaccggaaggaaccaattccggacacaatctggggaccccgaaatttactttcccttcacagtcccctccctcttccttctttctcctcctcacttcctttgtctctctcccctttctcctcactcttccctcatctgattctctctccatctgtctccttttttgttgttgtggtggtggttgttgagttggagtctcactctgttgcccagtctggaggctaatggcatgaccttggctcactgcaacggctgcctcccgagttcaagcaattcttctgcctcagcttctcaagtagctgcgattataggcacgcacctggataatttttgttttgttcttttttttgatggagatggggtttcactgttttccaagctggtatcgaactcctgggtgcaagtgatcctcccgcctccgcctcccaaagtgctgggattacaggtgtgagccactgcccccagttccttctctctcttctgtctgccgcttctcatcccttccacccaaccagggcgggagagggagggggatgaaaccaggacggggaggtgggagagggatgaaaccagggcggggaggtgggagagggatgaaaccagggcggggaagtgggagagggattacaaactccctctatttactctcaagcttctctgtttccacctccactaaccctggaaccctgaggcgccccaggcctgcagtgtataaatgccttcctggcaggccttgctgagacttgagctcagcagtcctcaccctccttaatcctaaccaaacaggatctgtcactaggctcagcgtgcagaggacgcctcgggtccttttcctcctgcgaaaccacagaggcagccctaggggcaaacaataaaacagtgtggagggctgggggatgagggtgggagcatgcctggcagggaacgtttctttttttttcctccttcaaaaattggaggggaggcctggcgcggtggctcacgcctgtaatcccagcactttgggaggccgaggcgggcggatcatctgaagtcaggagttggagatcaaccagaccaatatggtgaaaccccatctatactaaaaatacaaaaattagccaggtgtggtggtgggaggctgtagtccgagctactcaggaggctgaaacagaagaattgcttgaacccgagagttaggtggcagtgagccgagatcgtgccattgccctccagcctgggtgacagagtgagtctcaaacaaacaaacaagcaaaaaaaaaaaaaaaaaacaaggaaggggatcaaaactgtcagttgggacaaatacaggctttactatggtaattctctggctttgagccaaggactgcaccctccccagggggcagcgctgagagctaagtcacccaggatggtttaaaattaaactcaattttcaacattgtaactcctcacagacaaacacaactgtgtttactaatagcatttctcggttttatctgacttttgagttctgaagtcgggagatgtggaggctggaagtataaactgagacgaagtgggcagaacagctccctcccggcttccccatccccagccagcctctctgattttctttttctttctctttttcttttttttttttgagatggaggcttgctctgtcacccaggctggagtgtagtggcccgatctcagctcactgcgacctctgcctcccagactcaagtgattcttctgcctcagcctcccaggtagctgggattacgggcacgcgccatgatgccaggctatttttttatttttatttatttattttttaaagtagcgatggcgtttcaccatgatggccaggctggtctcgaactactgacctcaggtggtccgcccacctcggtctcccaaaatgctgggattacaggcatgagctcctgcacctggcccagcctctctggttttgatctaagtcatgcccaaagcttggaagcggctttacactacctttctttgctcaaaaatttgccatccatctatctgtctgtccatgcaataaatatctagtgatctaatagaggctgaattctgtgctaaaagctaaggattatggtattatttatttatttatttatttatttatttattttgagacggagtctctctctgtcacccagaccggagtgcaatggcgtgatgtcggctcactgcaacctccacctcccgggttcaagcaattcttctgcctcggcctcccgagtagctgggattacaggcgtgccccaccatgcccaactaatttttgtatttttagtacagatggggtttcaccatgttggccaggctggtctcgaactcctgacctcgtgatccacctgcctcagcctcccaaagtgctgtgattacaggtgtgagccatcgcgcccggccctattattactattactactataacaataaaaacagcaatttatttatttatttattgcaagacagagtcttacactgttgcccaggctggagtgcagtggcagatcacggctcactgcagccgcaacctcccaggctgaagctatctttctgcctcagcctcctgagtagctgagaccacaggtgtgtgccactatgcctagctagttctttaatttttgtagagatggggtctagctatgttgccagggctagttttgatttttttttcttgtagaggtagggtcttgctgcattgcccaggctggcctcgagctcctgggctcaagcgattctctcgcctcaggctctcaaagtgctgggactttggctgggattacaggcgtgcaccatcatgcctggctaatttttgtattttttgatagagacatgatttcactgtgttttcccggctggtctcgaactcctggcctcaagtgatcctcctgcctcggcttcccaaagtggtgggattacaggcatgagccactatgcccagctccatctctctcttctatctgctgctacttctagaatacgtagtgggcgcagaatagggactatttaagtgtttgctggccagacatggtatcccatgcctgtaatcccagtactttgggagacacatagcccctattctgtacccactacgtattctaggagttgtttatttagtccttctagaaacatttcaaacctgatgtggtggctcacgcctgtaaccccaacactttgagaggctgaggcaggagaatcgcttgaacccaagagtttgaggccaggctgagcaatgtagcaagaccctatctctgcaagaaaaaaaaaatcaaaaaattagtcaggcatagtgatgcacctctatggttccagctacttgggtggctgaggtgagagcattgcttgaacccaggaggttgaggcttcagtgagctgagatcaccttgccactgcattccagcctgggtgacacagcaagaccctgcctcagaaataaataaataaataaataaataaataaataaataaataaataaaaacccttctacatctcccattttatagaggaggatacagaggttcagagaggcccccaagtcgtatggctgagctgggatttgaacccacaatgatgggtgctcttcaccaccttgcagcttgccactctcatgaaaaacatacagtctggtgcggcacacatgataactacacaaacaaggtaattcagatatttaaatgctctaaagattctacatcaggttatttccagtattattttcctggtcatccctggaaggatgagaaggaaccaaccttcagaagagctgcagagagaacacccagacagagtaaaaagcaagtgcaaaggccctgtggtccaaaccacttaaaaagatttggaagcagcagaggtcagagtagcaggaaggaagagacaagaggcaacagagcaggatatgatgatttcaggccacagggggagtttgggtttcgttgtttcttttttgagataggttctggctctgtttcccgggctggagtgcagtggtgcagtttcagctcactgcctatcttcacctcccgggtcaagccatcctcccgcctcagcctctcaagtagctgggattacaggcatgtgccatcacgcctggctaattttttttttttttttgagacagagttttgctcttgttgcccaggctggagtgcaacgatgcgatctcggctcactgcaacctccgtctctcaggttcaagcgattctcctgcctcagcctcctgagtagctgggattacaggcatgtgccaccatgcccagctaattttgtatttttagtagagacggggtttctccttgttggtcaggctggtcttgaactctcgacctcaggtggtccacccgcctcagcctcccaaagtgctgggattacaggtgtgaaccaccgtgccaggctttaattttttttttttttggagatggagttttgctcttgttgtccatgctggagtgcaatggcgtgatctcggctcactgcaacctccgcctcccgggttcaagcgattctcttgcctccgcttcccgagtagctgggattacaggcgcctgccaccatgcctggctaattttttgtatttttagtagagacggggtttcaccatgttggccaggctggtctcgaactcctgacctcaggtgatccgcccgcctcggcctcccaaagtgctgggattacaggcatgagccaccgtgcccagccgttaatatttgtattgtttgtaggggcatggtcttgctatgttgcctaggctggtttgggttttatccccagtaggacaggattctaggagcacagcagggatggggtggccattttacaagcactccaggggtggggttggtaaaagcgtcacgtcccagctgtcctccctctaggatgtttatcacccctgtcctgcaagatctaattctatgatgtctttgctgcccctgaatgacaacaacaaggcagattaccccaactctttcccctctgctgtatatttaagcacctcccctttgactttatatcctggactagtctgtgtaaagacaaagaaaaacgagaaacaagaggcttaattcttcctgtattctggtttcggggaagggtcaaaatataacttcagtggatgccttgctccaaattgcaaaactccctcctgtcatgatgaaagatgtgtttttcccctggataaagccaattagctcacaccgtcgtcacaatgactaggtggctccaggatgaactatgcgtttgataaacggtgctgtcaagttctgttactggagaactaatgattatttatcatgaggcatgaaggtgacaggtttatctgcttggctatagaaaaagggtgagatgtaggctggacacgatggctcatgtctgtaatcccagcactttgggaggccgaggtgggcagatcacaaggtcaggagctcgagaccatcctggcaacacgttgaaaccccgtctctactaaatatacaaaaaattagccgggtgagatggtgggcgcctgtagtcccagctactcgggaggctgaggcaggagaatggtgtgaacctgggaggcggaggttgcagtgagccgagattgcgtcactgcactccagcctgggcgacagagcaagactctgtctcaaaaaaaaaaaaagaaaaagaaagagggtgagaggcaggctggacacggtggctcatatctgtaatcccagcacttagggaggatgaggcaggcggatcacttgaggctaggagtctgagaccagccatggtaagaccccatttctactaaaaatacaaaaatgagggctgggcatggtggctcaaatgcctgtaatcccagcatattggaaggccaaggtgggtggatcgcttgagttcaggagtttgagatcagcctggccaacatggcaaaaccccgtctctactaaaaataaaaaaattagccagacatggtggcgggcgcctgtaatcccaaaaaaaattagccagacatggtggcgggcgcctgtaatcccagctactccggaggctgaggtggaaggatcatttgaaccggggaggggaaggttgcagtgagccaagttcacaccactacaatccagcctgggcgacaaagcgagactccgtctcaaaaacaaaacaaggccgggtgcagtggcgcatgcctgtaatcccagcactttgggaggctgagatgggtggatcacaaggtcaggagatcgagaccatcctggctaacacggtgaaaccccatctctactaaaaatacaaaaaaattagccgggcgtggtggtgggcgcctgtagtcccagctactcgggaggctgaggcctgagaatggcatgaacccgggaggcagaacttgcagtgagccgagattgtgccactgcactccagcctgggcgactgagcaagactctctcaaaaacaaaacaaaacattagctgggtatggtgtctcttgcctgtaatcctagctactcaagaggctgaggcaggagaatcgcttgagcccaggaggcggaccttacagtgagctgagatcactgaactgcactccagtttgggcgacagagcgagactctgtctcaaaaaaataaataaataaaataaatgaaaaagggcaagatttctttctgcctttgcaatgtcctaggccttatctacgacgtgcaccacactctggatgaatgcttattcagtgataacattaaggggtatttttttcctttcccttctacttttgtggagaggtttcctgagttgagagaagattcttgcatttagttgtatttccacaacatcagcacgtcctacattttttaaatctgcccagccagcctgaatttcaggaagccagagaggccctagttggttgctcttatttatttacttagagacacagtctcactctgttgccccaagctggagtgcagtgatggaaatctccgctcactccaacctctgcctcgtggattcaagtgattctcgtgcttcagcctcccgaggagctcggattacaggcactgaccaccacacccagctaatttttttgtatttttagtagagatagggtttcgccatgttggccaggctggtctcgaactcccaacctgagttgatctgcccgcctcggcctcccaaagcgctgggattacaggtgtgagccacggcgcctggcctgttgctataattttagagaaacacagtgggctctatcattagtcctgggttcaaatcctgtgtggtcctggataggccactcaaattctgcctgtttcctctctagtaaattagggttacgtctgacagcatctattttggagagtcattgctaggactaatggtgacaaagagcttaatacagatcctagcccagatcaaacaattttagttaatagtaataaccaccttgcttttaggatagctgagactcactgggccagcaccatgccaagctcctatcttagtaacaatgaaatgaggcctacctttacaataaaagctaacatatcctgttggccatgtggcaggcactgggctaattcctttttagttttttaaattttttagagacaggatctggctctgtcacccaggctggagtgcagtggcatgatctcagctcactgcaacctctgcttcctgggctcaagtcaccctcccaccgcagcctcctgagtagctgggactacaagggtgcaccaccacacctggctaatttttgtattttttgtagagacagggtttcgccatgttggccaggctagtcttgaactcttgagctaaagtgatccgcctgccttggcctcccaaagtgtggaattacaggcgtgagtcaccgtgcctggctgtctgcctttactttctttctgtcctttttttttttttttttttttttgctttgagacagagtctcaatctgttgcccaagctggagtgcagccgaacaatcatacctcactgtagcctcaacctcctggacccaaatgatcctccgacctcagcctcctgagtagctgggactacaggcacgtaacatcatgcctggctaatttttattttatttttagtagagaaggttttgctgtattgcccaggctgttctcaaactactgagctcaagtgatcctcccatcttggcctcccaaaatgttgggactgcaggcctggctaattaaaaaaaaatttttttgcagagatgggggtctcacaatgttgcccaggctcgtcctgaactcctgggctcaagcaattctcccacctcggcatcccaaagtactgggattacaggcaagagccactgcgcctggcctctctttgcatttttcttttcttttcttcctttctttcctctccctctctctctctctctctctcccttctcttttttgagatcaagtctcactctgttgcccaggctggagtgcagtggcgtgatcttggctcattgcaacctccacctcccaggttcaagcgattattgtgcctcagcaacccaagtagctgggactataggcgtgagccaccacacctggctaatttttttttttgtatttttaatacagatgaggtttcaccatgttggccaggctggtctcgaactcctgacctcaggtgatctgcccatctcggcctcccaaagtgccgggattacaggcataagccacctagcccggcctgcatttttcaagactacaataaactgtcattaactatcgtcaccctgctatacaatagatgtcttgaattttttcctcccatctaactgtaattatgtatctttttaccacctctcctcatccatcttcctcaacacccttcccagcctctggtaaccaccatggtaacctgcagacaccttcatctccaacttccggcctgcagaacggagagatgatacatttctgttgttgaggcctccagtctatggtacttggttatatcagcctcagaaaactaatgcaacctccaaatccctcatcgctccctctgagtgtcttgtctactttttctccagtgtcctgtaagtcctcaaagcctgcaggggcacatagcaggggctcaatgtacaaatgcccattcactgactacatgatcctcccaggagaggtaggagaaacatgagccagttaaagaagagagactggggtcgggtgcgatggctcatgcctgtaatcccagcactttgggaagatgaagcaggaggattgcttgagtccaggagttcaggaccagcttgggcaacatagggagaccctttttctctacttttatttatttttattttttatttttttggagacgaagtcttgctcctgtcccccaggctggggtgcgatggcatgatctcggctcaatgcaacctccgcctcctgggttcaagcgattctcttgcctctgcttcctgagtagctgggattacaggcgcctgccaccacacccagctaatttttgtatttttagagacggggtttcaccatgttggccaggctggtctcgaactcctgacctcaggtgatccgcccacctcagccttccaaagtgctgggattacaggcatgagccaccgcgcccagcctcctttctctatttttataaaaattcttgggctgggcgcagtggctcatgcctgtaatcccagcattttgggaggctgaggtgggcagatcatgagatcaggagatcaagaccatcctggctaacatggtgaaaccccgtctctactaaaaaatacaaaaacaaattagccgggcatgacggcgggcgcctgtagtcccagctacttgggaggctgaggcaggagaatggcgtgaacccgggaggcagagcttgcagtgagccgagttcgagccactgcactccactctgtctcaaaaacaaccaccaccaccaaaaaaaaaaaaaaaaaaaattcttggccaggtgtggtggcttacgcctgtaatcccaacactttggcaggctgaggcaggcggatcacctgagatcaggagtttgaaaccagcctgaccaacatagtgaaaacccatctctactaaaaatacaaaattagctgggcgtggtggcacacgcctgtaatcccagctactagggaagctgaggcaggagaattgcttgaatcaggaaggcggaggttacagtgagccgagatggcaccattgcactcccgcctgggcaacaagagcaaaactccgtctcgaaaaaaaataaataaaataaataaaataaaataagaattattaaaaaaaaaaaagagagagagagaaagagagaagagattgggaactggccccacgtctcctgctacaggaccttgggaaaatcctgaaccctttgaacctcagtttgctcctccataaaacggggccatcagaccatcagccaatatctctaagctccccgtgggattgtgaatcctacatgtcccccaccccaggcttgcatgaaaaataaggtttctcttgggtgccacacagagaggatcccttctgtgtccctcaagccatctgtgaccgtcccacttcataaaagcaaaggtcacttgctcattgaaacttcctctgtgccaggcaagagctgcatcgccccaacaggcccctcaagcaagatgctattatcattatcatgatgccctttttgcagatggggaaaagtgaggctcagaaagaccaagtccgcaggccccatctctactgaaaatacaaaaacattagcgcccgtaatcccagctactccggaggctgaggcaggagaattgctgagatcgcgccattgcactccagcctgggcgacaagaccaaaactctgtctcaaaaaaaaaaagaaaaagaaagtaaagggggagaaggaaaggaagagggtggttgggaacacagaagaggtgacaattgggtagggactcaagctggaaagggggacaaagtggaagctgggtgcagtggctcatgcctgtaatcccagcactttgggaggccaaggcgggaggatcacttgtgcctgggagttctagaccaacctggccaacacagggagacctcgtctctgcaaaatatttaaaaacaattagctgagctaggtggcacacatctgtggtcccagctacttgggaggctgaattgggagaagcacttgagtttggaggtctaggctgctgtgagccgtgatcatgccaccatactccagcctgggcaacagagcaagatcctgtcaaaaaaaggaaggaaggagtggggttgacatgcaaggccatttgaggatgggctgggacattgtggactcatttccctcctccccagaggaccagaaggagcaagagatccccttacctgtgggcagcaggtatctcagcattagtaacaccagggcccaccgccggcctccaggggcaccctgccacaggccagccattcacggcttcaggaagacttgggggctgctctttgccctcgttccagccccccagccaagcccagagacatgtccagcagctccaggcggccaggtgcctaagatctggcgggtatcaaatgtgcccagtcagcctaatccctgcgaggctgggcggggctgggaaggatcccctcgcctattcccaggccctgattggctccctgggcccttggttctgcctgtctgggctcccaggaagacagggctccatgggcattgaggggagcgggagtttcagctgccaggctcagctgcgggtgtcaggaaaagtctccctagaatgttccccagacccagagctgcactgcgactttcatgggccacaatcacttttgcaatttacccattacttttttttttttttttgaaaggaagtcctattgtgttgcccaggctggaatgcagtggtgccatcttgtctcacagcaaactccgcctcccggttcaagcgattcttgtacctcagcctcccgagtagctaggactacaggcacacaccaccatgcccagctaatttttgtattttttagtagagacagggtttcaccatgttggtcaggctggtctcgaactccctatctcaagtgatccgccagccttggcctcacaaagtgctgagattacaggcgtgagccacagcgcccagcctatacttacattcctccctccccagctttattgaaggatgattggcaaataaaacattaaatatcttataatttgtaataatttttgagcaaagaggctcccattttcactttgcactggaccctgcaaatcacgcctctggtcctgctgcaagcggtagtctctgctattccacagcagcctcatgttctctctctgtgacgctctgaattgtatccccctcaaattcacaagttgaagcctttacttccgatgtgactgcattcagcaacagttttcaggctgggcgcagtggctcatgcctgtaatcccagcactttgggaggccgaggagggtggatcacctgaggtcgggagttcgagaccaacctgaccaacatggagaaaccccatctctactaaaaatacaaaaatcagctgggtgtggtggtgggcacctgtaatcccagctactcaggaggattcaagcgattcttctgcctcagcctcccaagtagctgggattacaggtgcacgccactacacctgggtaattttttttttttttagatggagtcttgctctgtcgccaggctggagtgcactggtgcgatagctcactgcaacctccacctcccaggctcaagtgatcctcccacctcagtctcccgagtagctgggttacaggtgtgcaccaccacatctggctaatttttgtatttttagtagagacagggtttcaccatgttgcccagtctggtctcgaactcctgagctcaagcaatcctcccgactctacttcccaatgtgctgggattataggcatgagccactgcacttggtcatctaagtcttattgcttatctccagcacctatcaacttagaatatgcttgctaaatgaataaatatgtgaattaaagaataagtgggctgggcatggtggctcacacttgtaatcccagcactttgggaggctgggtcaggtggatcatgaggtcaggagttcaagaccagcctgaccaacatggtgaaaccctgtctgtactaaaaatacaaaaaattagctgggcgtggtagtgggcacctgtaatcccagctacttgggaggctgtggcagagaattgcctgcatcagggaggtggaggttgcagtgagccgagatcgtgccactgcattccagcctgggagacagagtgagtccgtctcaaaaaaaaaaaaaaaatgaaaatagagttggctttgagtggagagaaatcaaggaggaccacccagaggaggtattcaaaaccttccagttaaaatttgcccaccagctttgccatataatgtggaatcagagagtgtgatgtctccagctttgttcattttgcttgagatggctttggctatttggggtctctatcaatggataaatggataaagaaaatgtgtgtatatatatacacacacacacacacacacacacacacacacacacacacgatgaatactatacagccttaaagaagaaggaaatactgtcatttttgaccacacggacgaacctgggggacattgtgcgaagtgaaataagccaggcacagtgagacaaatactgtgcgatttcgcttaactgtggtatctgaaaagatcaaattggtcgggcgaggtggctcacgcctgtaatcccagcacttcgcgaggccaaggcgggaggatcacttgaggtcgggagtttgagaccagcctggccaacatggcgaaaccccgtctctatgaaaattacaaaaaaaaaaaattagctgggtgtgttatcgtacctgtgatcccagttacttgggaggctgaggcatgagaattgcttgaactgggagacagaggttgcagtgagccatgatcacgccactgcactccagcctggtgagagagcaagactacatctcaaaaataaataagtaaaataaaaaggttaaactcatggaattagagagtagaatgatggttaccagggctggggaagtgggaagactgaagagagttagttggtcaaaggacacatgttttagttagcaggaataagttctagtgatctattgtaactataggtcaaaataatgtattacatatttcttttttttttttttgagacagagtctcgctctgtcacccaggctgaagtgcagtggcccgatcacagttcactgaaacctccgcctcgcaggttcaagcgattctcccgcctcagcctgctgagtagctgggattacaggtacacgccactacacccagctaatttttggatttttagtagagacgggggtttcaccatgttggtcaggctggtcttgaactcctgacctcaggtgatccacctgcctcggcctcccaaagtgctgggattacaggtatgagccaccatgcccggcccacatatttgaaaattgctaaaaagagtttattttacatagcgacgtcgctattaagaaaaaaaaaagtttattttaaatgctcttaccacacacacacacacacacacacacacacacacacacacacacgataagtaggtgagttgatggctatgttaattagcttcttaaataattccacaagatatacatacaaatatcaaaatatcagattgtaccccataaatagatacaattattatttgtcattaaactttttaaataaagaaaatttaaaaataaacaattgtccaccaggttcctctttctttttcttttcttttccattttttttttttttttttttttttgagacagggtctcactctgttcctcaggctggagtgcagtggtgcaatcatagctctctgcagcctcaaactcttgggcccaagcaatccacctgcctcagtctcctgagtaactgggactacaggcatgtaccaccgtgcccagctgatttatacttttttgttttgtagagactgggtctggatatgttgcccagggtttttgtttttttttatgtgggggtgggtgggtggggggtgaggaccgagccttgctctgacacccaggtttgagtatagtggtgtgatcttggctcactgcaacctccgcctcccgggttcaagtaattttcatgcctagcctcccaagtagctgggactacaggtgctcgccaccacacctggctaatttttttttttgtatttctaatagagacaaggtttcaccatgttggccaggctggtctcaaactcctgagttcaggtgatctgcctgccttagcctcccagagtattgggattacaggtgtgagttcggctccaggctggatcttgaattcctgggctcaagccatccttctgcctcagcctcccagaatgctgggattacaaagcttgagacagcaccttggccaccaggctcctcttttcttttttctttttttttttttttgagacggagtctcgctgtgtcacccaggctagagtgcagtggtgcgatctcggctcaccgcaacctctgtctcctgggttcaagcgattctcctgcctcagccacctgagtagctgggactatagccgcacaccaccaagcctggctaatttttgtattgttagtagagacggggtttcaccatgttgggcaggctggtcttgaactcctgacctcgtggtctgcccaccttggcctctcaaagtgctgggattacagatgtgaggcactgctcctggccaggttcctcttttcaaaggcagctcccgggggcacggctgacttgtgtctggtaactttttttttttttaaggaaaaccatctagttttttgggaaaaccagactcagagctcagaggatctgagcagagatttaggctcctgggtcctccagctccttgaacccacggggaatccagcagcggttgctcccttcccccctaaggaatgcaggaaccctgcccagaagtggcattagtaactgagctctccctttgtccctaagctgccattccattgtcttcccccagtgatcacggaaaaggtcctggagggtggaggagaggtgctcagaatggaggaggaggaggggtgttgggactgctcagctcctgctgaagtaaacacctgctctgtgttccataagctgggaccccagggtcaggccaaagggaaatggataccccgggtttgggtggtcgccacaaattctaatgcatgtactacctacatcatagccgcccccccaccaaataagcccagtgattaagcgtacagtttctggagcctggtgccagagtttgaaacctcctttttttttttttttggagacaaggtcttactctgtcgcccaggctggagtgcagtggcacgatctcggctcactgcaacctccacctcccaggttcaagcgattctcctgcctcagcctccctagtagctgggattacaggcaccccccactgtgcccacctaatttttgtatttttagtagagacggggttttaccatgttggccaggctggtcttgaacttctgacctcaggtgatccacccgcctcagcctcccaaagtgctaggattacaggcttcaaccaccacgcccggcctaattttttttttttttttttttgagacagtttcgctcttgtcacccaggttagactgcaatggcacagtctcggctcacctcaaactccacctcccagattcaagcgattctcctgcctcagcctccggagtagctgggattacaggcgtgcaccacgacgcccagataatttttgtatttttagtagagacggggtttcaccatgttggtcagactggtcttgaactcccgacctcaggtgaccagccctccttggcctcccaaagtgctgggattacaggcgtgagccaccacacccggccctctttaaagttctaaaatgcttctaacctttaagctgtccttgttcattcctgggcttaggccaaactaactttgggaaggaattcagctgatggtttgactctgaaacaaaactgataacagccctttccctaaaagacccacttcttgcctgggaaccagtctgcctttgcaggactaacaaattagctacaagattagaaattacagtttaggagtcatgcagcctctgggtccaagagtctgaacgtccccagattgctcccagaggtagcatcactattgtaaaacctaaaatcagtgcttgagatagtttgcagaccctgcactcgatggatcagctgacaccacccagaccatcagaccagaccagtcaagatcgcaccattgcactccagcctgggcaacaagagtgaaaccccatctcagaaaaaaaaaaaaaaaaaaaaaaaaaaaaaaagaaggaaaagaaagaaactctacacttcctgtccttattcctgggaatttatttaacaatttaatttctcaccatacccgagggaaggcacagcctattgcaaagtcattttgcacgaaagcaaactggggctcagagaaccaggcctccagtcagtgctggtgtcatggacaaccaggctgagggcccatggcagaacctgttttatgacatggctgctctccctgaagccagtgaggcacaaagcctaggggagtggacaagggacaggaaggtgtgggtttccatcctgctgtgtgaccttggggaagtcacctaacctctctgagcctcatttttctttcttttttcttatttatttattttgagacagagtctcgctctgtcgcccaggccagagtgcagtggcgcaatctcagctcactgcaagctccgtctcccaggttcaagtgattctcctgcctcagcctcccgagtagctgggattacaagcgcgtgccaccacgcctggctaatttttgtatttttaatacagatggggtttctccatattggtcaggatggtctcgaactcctgacctcgtgatttgcccacctcagcttcccaaagtgctgggattacaggcatgagccaccgtgcccagccttcttgtttttagtttttttttttttaatgaaaaaaaaagtattattatggccgggcacggtggctcacgcccgtaatcccagcactttgggaggccaaggtgggtggatcacctgaggttaggagttggagaccagcctgaccaacatggcaaaacctcatctctactataaatacaaaaattagctgggcatggtgtcgcatgtgtgtaatcccacctacttgggaggctgaggcaggagaatcgcttgaacccgggaggcagaggttgcagtgagctgagattgtgccactgcaccccagcctgggcaacagagagagactctgtctcaaaaacaaaacaaaacaaaacaaaaaccagaagagatgtgtggtgcatgtaaaatacacatgagatgagattttgaagactgattttgaaaaaaagaatgtaaaatgtcttggccataactttcatcagaattacttgatttgtatttaaatatcatggcatttagtttatgggggatttttttgttttaatttatcttttttctttttttccagcaaatgcttaacatccaaagtttatggttatatgtttgagatgggatctcattctgtcgcccaggctggggtgcagtggctcactgcagcctctacctcctgggttcaagccatcctcccacctcagcctcccaagtagctgggactatataggtatgtgccatcacgtttgactaatttttaaatttttttgtagaagccgggtgcagtggcaaatgcctgtaatcccagcactttgggaggccgaggcgggcggatcacctgaggtcaggagtttgagaccagcctggccgacatggtgaaactccgtctctaccaaaaatacaaaattagctgggggtggtggcgcgcgcctgtaatcccagctacttgggaggctgagacaggaaaatctcttgaacctgggagacagagattgcaatgagccaagattgtgccactgcactccagcctggacgacaaagtgagactctgtctaaaaaaaaaaaaaaaaaaaagttttctgtagacaccgaatctcactatatatgttccccaggatgaacttgaagtcctgggctcaagtgatcctcccatctcagcctcccaaagtgctgggattacaggtgtgagccaccgcgcccgacccatagatgcttgttaagggaaaatcccagcactttaggaggccaaggagggtggatcacctgaagtcaggagttcgagaccagcctggccaatatggtgaaaccccatctctacaaaaaatacaaaaattagctgggctttttggctggtgcttgcaatccttgagaggctgaggcaggagaatcacttgcctgtagtcttagctacttgggaggctgaggtgggaggatttgcttgaacccaggagttcaaggctgcagtcagctatgatagcgccactgtacttcaacctgggcaacagagggagacctggtcccttaaaaaaaaaaagacatttctcaagagggccttctaccttccttccttccctttgaaaaacctaggagggagttacagatgttattgttcaccagctgtatcctaaggaattcaggttcgtcctaaaggaaaatgccttttcccctttcctcacctcgttttagatactctctggaggattttcctcagattctcgctgaaacctgactctctcctggtaatgcaaatattcctgggctctctatgggaaagctgcggccctgtgcctgaccccagggcactgggagagaaagtctttccgggccgcaaggtgtcataggaaaggggtcccaatccaaaccccaagagagggctcttggatctcaggcaagtctgtaaagtgaaagcaagtttttaggaaagtaaaggaataaaagaatggctactccatagacagagcagccccaagggctgctggttgcccatttttatggttatttcttgataatatgctaaagaaggggaggattattcatgcctcacctttttagagcatctggggtaacttcctggtgtcgccatggcatctgtaaactgtcatggtgttactggtagaaggtgtccaggttcttggcatcccaaacaaagaattggacaaaacacaccaacaaagcaaaagcaaggaaggcagaagcagggattttttttttttttttttttttttgagacggagtcttcctctgtcatccaggctggagtgcaatggtgcaatcttggctcaccgcaacctccgcctcccgggttcaagtgattctcgtgcctcagccttccgagcagctgagattataggcatgcacccccatgcccggctaattttgtatttttttttagtagagtcggggtttctccatgttggttaggctggtctcgaactcccaacctcaggtgaactcccgacctcaggtgatccggctgcctcggcctcccaaagtgctgggattacaggtgtgagccaccgcgccccagccagaggcagggatttattgagaatgaaagcacactccacagtgtgggagtgggctggagcataggggctcaaagtccccattacagaatttttcggagtttaaataccctttacttggggtacgccctatgtaaatggagaggatgaagtaaggttacagtcattgacttggcttccgcccttcctgccataggtgaagtgtgaatcgaccttatattcttggcctccagaccttgttttcctgactcagtgacactgatgggagtgtagcagtgaggacaaccagaggtcactattggggccatcttggttttggtgggttttgactggcttctttttgcaacctgttttatcagcaaggtctttatgacctgcatcttgtgctgacctcctatctcatcctgtgacttagaatgccttaattgtctgggaacacagcccagcaggtcttggccttattttacccagcccctacacaagatggagtcactctggtttaaacatctctgacaaaggcattcagagagaaagtctgtccatgtgaacattgtctcctaagcttgccgggtgctccaatcacggccatgggcaggacgtgtgacagctggtctccccctccaagactcccagactagcaggcaaatctaacattccagaaacccttaaatagttcatgaatgacacctgaaatctgcattctgctgggggaggcagggacgtgtcttggccgtggctgggaagcaagatttttaaagctcaggcctgagctggaagaaaagactggaggaagaggggaggggatgggcaggattccaactctcctgggggagttccaggctggggcaacaccggttttactttctgaagcggagggaggtctctgtccatctcctgctgacacccaccccacctgggcctggctgctacccgagggtaattatctgcacccagccatgcaccgcaccgccgttcccactgcccatgactcactcggccccccttgcgttctttgttcttcgcctccttcccccacctccctgcaggcttcacactttgcaggcctaggtcttagtcatctctgggaacggctccaattttcttacaatgataagtaaatggatcattctttagctcggctagaatgtccccatctttattctcagagcaattccttgcacatagccgcatgccctcatcatagggattttgccctggctgccaccttgccctccttctggttccctgtttcattttcgaaggtctttcttctttgagacaaggtctcactctgcccctaggtgaagggcagtgatgcgatcatagtttactgtagcctccaactcctgggcccaatcgatcctccaaccttggcctcctgagtagctgggactgtaggcacccggctaatttttaaaaattattttcagagacagggtcttggccgggtgcggtggctcatgcctgtaatctctgtactttaggaggccgaggtgggtggatcacctgaggtccggagttccagaccagcctggccaaaatggtgaaaccccgtctatattaaaaatacaaaaaaattagccaggcgtagtggtgcacgcttgtagtctcagctactcaggagactgacgcaggagaatcacttgaacccaggaggtggaggttgcagtgagccgaaattatgccattgcactccagcctgggcgacaagaacaaaactccatctcaaaaacaaaacaaacaaacaaacaaaaaaactcaaaagagacaggttcttgctgtgttgcccaggctggtctcgaactcctgacctcaagtgatcctactgcattggcctcccaaaatgctgagatgacagtcgtgagccaccacacctggcctcgttttgaaggtcttgaatcaaataattaccttttccttgaggtatctggaatatatagataacataaccggttaggtcaggggtcgatctttaaccaggcccagggtgcggtgccgggctgtctgcctatggatttgatttctgccatttagtttttacttcttctttctttggaggcagaaattgggcataatatgaggggtggtgtcctcccttactatgattgtgcccctgcactccagcctggtcaacacagcaagaccctgtctcaaaaagaaaagggatctaacatctttttaaatttacttatttattctacctgtagactcttaacactagaatgtcagggatttttgcatgttggttcattcactgatccgttgtattctcagacctggggcttgtcaagcatgcaggcactgaatgaacatctgttaaggaaatgccgagtgagccaagcatggaatttgtaaggctcttgtgtcgtttcgaaccccgagagcaagccaacaaacaacatgagctggtgtggagcaacacgctgttttaatgtgcacctgggtgcagacggctgaggcctaaaatggcgtcagccccaagtgaggacggggcaggggttttatagtctcccgtaaacagcaagtgtcccagtctgacgtaactgctacatggtacccggatggcccgtctcttgatcttcaggggcatgtgtcttccggccagggtagatgtcttccagccagggtacgtgtcttccggccagggcaggtgtcttccggccaaggtagctgtcttccggccagggtagatgtcttccggccagggtagatgtcttccggccagggtaggtgtcttccggccagggtagatgtcttccggccagggtagatgtcttccggccagggtacgtgtcttccggccagggtacatgtcttccggccatctctcttcctgcttctgctatcttgctggcgcatgctgctggggcaagtagccttgcaccttgggactgggcctgagaagggaggagttattcatccccccaagtttatcctcccaagttttcaggccgcggggagaatctttcagaattattctgtcaatattgtttcttcccccttaccctggctctcttctcccaatcctgccctggtccccactctgcagatgagtagacactgtgtcccaccttgtcctgtgggtgcctgatacttgactctgtcagtgcttgtggctgctgtagttttatttattttcgagacagagtctcactctgtcacccaggttggagtgcagtggcgctatctcggctcaccgcaacctctgcctcccaggttcaagcgattcttctgcctcaacctcccgagtagctgggattatctaggcgtgcaccaccatgcccagctattgtatttttagtagagacagggtttcaccatgttggccaggctggtatcaaactcctgacctcaggtgatccccccacctcggcctaccaaagtgctgggattacaggtgcgagccactgtgcctggcttgtagtttaatttttatttatttatttatttatttatttatttatttttggagatgaagtcttgctctgtcacccagtctggagtgcagtggcacaatctcggctcactgcaacccccacctctcaggttcaagcgattcccctgcctcagcctcccaagtagctgggattacaggcgtgcaccatcatgcctggttaatttttgtatttttagtagagatggggtttcgccatgttggccaagctggtcttgaactcctggccttaagtgatctgcctgccttggcctcccaaactgctgggattacaggcgtgagccactgcaccaggccaattaacttctcctaatctgtaactaaggtctgagtcctgaagaccttcctctgagcctcagtaaatttacttaatctagatgggtccaggtgccagggatagttacccttatcttgtctcctgctaaattttagagtctagagagtttcttcagactcccaataaaacttgtttaatcctaaacaggtccattaagaattccttcattatcttgtcatgcttcaaggcccaggaaaggcctgggcaaaactcttggtgtgcttttgttacgttccagcctttgtctaagggcactggcgctatcatctttaaatatttaacttaaccacgcagtcagtgctgaaacagttgttagagaggcctgtgttagtgagacctggcctgtcacagtatctctctgtctctctttccctccctctctctttttcttgcataactgcagtatctctctgtctctgtctctctctgtagcgctccctctgtctctctctttcatttttcttttctttttatttatttatttatttattttttgagacggagttttgctcttgttgcccaggctggagtgcaatggtgtgatctcggctcactacaatctccacctcccgggttcaagcaattctcctgcctcagcctcccaaatagctggcattacagtcacacaccaccatacctggctaattttttttttttttttttttttttgagatggagtctcgctctgtcgcccaggctggagtgtagtggcgcaatctcggctcactgcaacctccacctcccaggttcaagtgattctcctgcctcagcctgccgagtagctgggattacaggcgtgcaccaccatgtccagctaatttttgtatttttagtagggacagggtttcaccatgttggtcaggctggtctcgaactcctgacctcttgaactgcccgcctcggcctcccaaagtgctgggattacaggtttgagccaccacgcctggactaatttttgtatttttagtagagacggggtttcgtcatgttggccaggctggtcttgaacgcctgacttcaggtgatccacctgcctcagactcccaaagtgctgggattacaggcgtgaaccaccaggtccggtcttctctctctctttttcttgcataacttcagtatctctctgtggacaacagaaaccagatggccccagtcctgggttaggtgggaagatattcaccgagcccaggggctggggtgggaaatttggaaaacgtaaggccactttcaaccctttcccagtgtgccttaacttgggaagcccctgggctataggcttctggctccccagtggcaaaaggcactgaggtcaggtggggaaagggaccaggattaagcaaaatgtctgtgctaggcgggagatgctgtctgtgaaaagtgcccgagggactggagcacctgagacgtcctcgctgcgtgtttcttctgccctcgtgtgtctccattgggaactgcagtaacccaagtctaggtttttgttgttttttgagatggagtctctctctgccgcccaggctggagtgcaatggtgtgatcttggctcattgcaacctccacctcctgggttcaagcgattcgcctgcctcaacctgccgagtagctgggattacaggtgcccgccaccacgcctggtgaatttctgtatttttagtagagatggagttttgccatgttggccaggctggtcccaaactgctgacctcaggtaatctgcccgcctcggcctcccaaagtgctgggattacagatgtgagccaccacacccggccttaagtttattattattattattattttagacagcatcttgctctgtcacccaggctggagtacagtggtgcaattatggctcattgtagcctggacctcccggcctctgctgatcctctttcctcagcctcccaggtagttgagactacaggtgtacaccaccaggcctggctactttttttttcttttttggtagagatgggatctcactatgttgcccaggctggtcttaacctcctgggctcaagcaatctacccacctctgctgggcatggtggctcatgcctgtagagccagcactttaggaaacctttatttcttaacacagagcaagttggagatgtttttgtttggctgacagaatcttaagagatttattggtgcctgaggcatttctcatttcacaggggagggaggggtctaaataaatgcttcagctcaagctggatacagagggagggattttcccaaatttctagcagcccccaggttgtaataacttcccaagtctctggcaattccagccttctgtcaattagcactgtaatcacctgcgtgcctatggcaagagagtttagggaacttgcaagaagagagagctgtagtttcgctttcccatggtttctggttactccaaaaaggccctgaccagaatcatggactctccatggcaaactctcatcttattttatatttatttgtttatttatttatttttttatttttgagatggagttttgttcttgttgcccaggctggagcgcgatggcatgatcttggctcatcacaacctccacctcccgggttcaagcagttttcctgcctcagcctcccgagtagctgggactataagcatgcaccaccatgccctgctaattttgtatttttagtagagacggggtttccccatgttggtcatggctggtctcgaactcccaacctcaggtgatccacctgcctcggcctcccaaactgctgggattacaggcgtgagccactgcacctggcctattttattttttatgtattttattttttgagatggagtctcgctctgttgcccaggctggagtgtagtgacgtgatcttggctcaccgcaacctctgcctcctaggttcaagcgattctcctgcctcagcctcccgagtagctgggactacaggtgtgcaccaccatgtctggctgatttttttgtatttttagtagagacgaggtttcaccatcttggccaggctgctcttgaactcctgacctcgtgatccagccgcctcagcctcccaaagtgctgggattacaggcatgagccattgcgcccaggcttactttatttttttagtttaattttttttttttgagacaagggtcttgctatgttgcccaggctggagcacagtgtttattcacaagcacaatcattgcacactacagccttgaacttggtctcaagcaatcctcccaacttccaattatcttaaattctgtttttgtctttgtttttgaaatggagtctctctctgtagcccaggctggagtgcagtggtgggatcttggctccctgcaacccccgcctcccgggttcaagtgattctcctgcctcagcctcccaagtaagtgggattataggtgcgcaccacctcgcctggcaaatttttgtatttttagtagagaccgggtttcaccaccttggccaggctggtctgaaactcctgatctcaggtgatccgcctgcctctgcctcccaaagtgctgggattacaggtgtgagccaccgtgccacctggccattctttttttttttttttttgccagagtcctgctctgtcacccaagctggagtgtggtggcaccatctcagctcactgcaatcttcgactcccgggttcaagtgattctcttgcctcagcctccgaagtaactgggattacagatgcccaccaccacacccagttaatttttgtattttagtagagatgcggttttaccatgttggccagtctggtctctaactcccgatctcaaatgatccacctgccttggcctcccaaagttctgggattgcaggcatgagccaccatccccggtcaaattctgtgtttcattcaccagaatagtcaccagaaagcagattttcttcgtctttccaacctgtgtacttacttatagaaatctacagcagggccacatctggaggtctgtttgttcacctgagaaattaaaatttaattctcttggaagaaaagtaacacaaataaatcagaggtttgattattcaaagccattctgcttaatatcatgtcagcttgaggccgggcactgtggctcatggctgcttttgcttttgctttgttggtgtgttttgtccaattctttgtttgggaatccaagaacctgaacaccttctaccagtaacaccatgacagtttacagatgccatggcgacatcaggaagttaccccagatgctctaaaaaggtgaggcatgaataatcctccccttgtttagcatatcatcaagaaataaccatgaaaatgggcaaccagcagccctcggggcttctctgtctatggagtagtcattcttttattcctttgctttcctaaaaacttgttttcactttgtggacttgcctgagatccaagagccctctcttgggatttggattggacccctttcctgtaacaccttggggtcaggaaaggctttctctcccagtgccttggggtcaggcacagggccacagcttccccatagagagcccaggaatgtttgcattatcagggataagagatggccttgcttccggtttgaaggctcaccagcatcttggggatggtgttggtggccagacagaaatcaatcagggacaggttggccaggaagaagtacatgggggtgtggaagtgggagtctatgctgatggccaggatgatgagcaggttccccaggactgtaccaggtacatgcagaggaacagagaaaagagaagtgtttcctgctccggcttttctgacagtcccaggaggatgaattgagatgcactggtttggtttcctggttccatgggtgtgattcctctggaagtatggaaaggggaggttataggaatgccagggagatggttttggaaggttagatgaactctaacctttaattttaacctttaactttagagaccctgtctctaaaatataaatattatatatgctataatatatatattatttttcagagacaagatcttgctctgtcacccaggatggagtgcagtggtgcaatcatagctcattgcaaccttgaactcctggactcaagccatcctcctgccacagcctctctagtagcagggtctacagtcacacatcaccatgcctggcctatttatcttcttttttgggggtggagagagggttttgctatcttgtccaggctggccttgaactcctgggctcaagcgatcctcccatctaggacttccgaagctctgcgattgcaggtgtgagccaccacacttggcctgacaacagcttatatataggttgcaccttgaaccatggatgaaatgtttacagcaactcatcttcttctttttttattaattaaaaaattttaggttggacgtggtggctcacggctgtaatcccagcactttgggaggccaaggcgggcggatcatttgaggtcaggagtttgagaccagcctggccaacatggcaaaaccctgtctctactgaaaatacaaaaattagctgggcgtggtggcaggcgcctgtaatttcagctacttgggaggcagagacaggaggattacttgaacccaggaggcagaggttgcactgagctgagatcatgccattgcactccagcctgggcaacaagagtgaaactccatctcaaaaaaataaaaaagtaatataaccattaatattgatgctactgtcaactgttgactctccaaacaaacccagcaagtgcttgtaagccaaaaataaccacccccatccatctgaagggacccctcctcttggccaaaggcattctaaagttaacctgaaaagctgcttcaggactgtgtgtggtggctcatgcctgtaaacccagcactatggtagatgggcgaatcactagaggccaggagttcaagaccagactctccaacatagtgaaatcctgtctctactaaaaatacaaaaacattagctgcgcgtggtggcatacacaggtaatcctagctacctaggaggctgaggcacgtgaattgcttgaacccaggaggcagaggttgcagtgagccaagatcgtgccattgcactccagcctgggcgacaagagtgaaactccgtctcaaagaaaaaaaaatgttaaaagaagtaatttatagagaagaatataatagaggtcagaaactcagatctacgtaaataaaggaaaagcattaaagaagtaataggtaaaagagaaacaagagcttttggctgggtgtggtggctgacacctgtaattccagcacttcagaatttttatcatgaaaggtttttatttcatgagtgtttattgagtgagcacattaccccataatctgggcattgcctcataaaaccaaatttctaaaaatttaggaggctgaggcagaagaatcccttggggccaagagtttgagaccagcctaggaaacctagcgagaccccatctctataaaacattaaaaattttttaaaaattagccaggattgatggcacacacctgtagtcccagttactcaggaggctgaagagggaggattatgtaagcccaggaattggaggctgcagtgggttatgaccagaccactgcactctaccctgggtgacagaatgacaccctgttcaaaaataagaaaggaaaacagaaaaacctatagattaaaaggacttaaaacagtaatcaaccaactgcaatctatggacattatatgaattctgatgtaaaaaactaaaaatatatgaggcaatttgggtaatttgaataataattgggtatttgaaaatgttatataattattattaatattttgaatcaaaataattgctaggcgcagtggctcacatcggtaatcccagcactttgggaggctgaggtgggtggatcgcttgaggtcaggagtccaagactagcctggccaacatggtgaaatcctgtctctactaaaaatacaacttgggagcctccctactcaggaggctgaggcaggagaatcgcttgaacccgggaggcggaggttgcggtgagccaagattgcaccactctactccagcctggatcacagagcgagactccatctcaaaataataataataataatggtattgtggttatgctttcaaaaagagctttttgttttttgaagacataccaaaatcattatacatatggaatttgctctgaaattatctctgggaagagagaggtcaaagtaggtaggacacagattcaacagaggcttgacttggtaggtgtggaagctgagtgattgggcacacaggatttcattatatgaagctgaggcataccaaaaaaaaaaatgccagttttgttgatcaaaaatggtagaatattgacaattgcatatggctcaacctagtattttgctctttacatagctaaaggctttgaaaaactgagccttcatgtatccatcagtttcatgagtgtttactgagtagacacaacccaataatctgggcatgaccttataaaaccaaattcctgaaaattcccagtaatgccaccatggtcccaatactcagtgagaatctggctgcagacttagtcagccaaccactctctccatgtacatccattagggtaggctctagtttctccttttgcagaactgaatgaaagccatgatccctttatagagagttgttctgttgaggttgagtgatgaaagcaggcagccctgggtcttggtgacagatcactgggtggacgtgggaaaatgtttggagtgtttcttagttcttttctttttttttttttttttttttttgagatggagtttcgctcttgttgcccaggctggagtacaatggtgcaatctcggctcaccacaacctctgcctcctgggttcaagcgattcttctgcctcagcctcctgagtagctgggactacaggtgtgcaccaccatgccaactaatttttgtatttttagtagagacagtgtttcaccatgttggccaggattgtctcaatctcttgacctcatgatccacccgcctcagcctcccaaagtgctgggattacaggcgtgagccatcacacccggccatttcttaattctttaagtgatgaggaacattggcttccaataagaatggaaccttctgatataagaagccctgggcattggaaagactgagtttagaagacagggagagtttgttcctggaagagagggtgcagagaaagttaggaatcatgcaacttacccctaagttgcctcatgaagacataaaatgcttcttactgccacgtcccagcccccataggaaacagaactattcagggactagagatgaaattggacaatttgtgtaacaaggagcttggggaattgacttcttattggcccagaaattgtaaatattccctcggttcctacaacttatcccccaccctagcttttcttctttggaccaggaggacaacttcccagtatttctatgtagcatctgctggcccaaacatctaacttcatcatctagtacctgctgggaggacactgagccagtttaactcatgcctgggtgatggtgtcaagaagaggaaagatagcccagtgagtgagctgagagagagagagagagagagagactgaacgaatgttggtaaaattaatgaagccaagctcaatgatctcagatacactggaagattcttttttattatttattgatttactgatttatttattttagagacagaaccttgctctgttattcaggctggagtgcagtggcacaatcacagctcactgcagcttctacctcctgggcttaagcaatcctcctgcctcagcctctagagtagctggaactacaggcatgtgccaccacacccagctgattttttgaacatttttcccccaccgagatggagttttgctcttgttgcccaggctggagtgcaatggcacgatcttggctcactgcaacctctgactcccaggttcgagcaattctcctacctcagcctcccgagtagctgggattacaggcatacaccaccatgccttgtgaattttgtatttttagtagagacaaggtttcaccatgttggtcaggctgatctcgaacacctgacctcaggtgatcacccgcctcagcctccgaaagtactggaattcactgtgctcggccgacactggaagattctgtctggtcaatcagcacccacttgtcagcccagaatccaatggctcttcttaccaaactagctcagcctggtttagttgtgatgctaccagtcctttacctaaaaaccatgattatttgtagcactgtttttcttcgtaactagactttttttttgaaatggagtcttactctgtcacccaggctgcagtgcagtggcatgatcttggctcactgcaacctccatctctcaggttcaagagattctcctgcctcagcctcccaagtagctggaattacagatgcccgccaccacacccagctaatttttgtatttttagtggagctggggtttcaccataatggccacgctggtctccaactcttgacctcaggtgatccacccgcctcagcctcccaaagttctggtattacaagcatgagccactgcgcccagcctggactttcttttccaagcccacttgagtgcctgaaggaacagatggcttcctcctcagtacttctgtaggcagaagtttgtgttattccccatgttgggtcttggaagcccttggagattcccaagtattccaggctgagagatcttagacacagagtgcagaggtccagataggataggactggtgcttccttggagagaggctcatcaagaagcttaagggatgaatcttcgggttcctgatacttaaatttttcccaagagctgtggaagaatgaggagtgacagagtaattcagtgaaagcttaggtgtcagggcaggaggatgtctgagatcagttccttgattccattagtagtttaatcacagagcattcactggcttccttgagatggaaaaatactctgactcggccaggcacggtggctcacacctgtaatcccagcactttggaaggccgaggcgggcggatcacctgtggtcaggagttcaagaccagcctggccagcatggtgaaaccccatctctagtaaacatacaaaaaaattagccaggtgtggtggtgggtgcctgtaatcccagctactcgggaggctgaggccagagaaccatttatatccgggaggcagaggttgcagtgagctgagattgcaccattgcactcctgcctgagcaacaagagcgaaactctgtctcaaaaaaaaaaaaaatactctgactccttttaaaatgttttaattgtatatatttatgaggtacatagtaatgtttccatatatgtaatgtatagtgatcagatctgggtaattagcacatctattatcacaaacatttatcatttctctgtgttgggaacactcaatatcctccttctagctgtttagctatatagcatattattgttaactgtattcatcctacagggatatagaacactagaacttattcttccaatttgcctgtagttctgtatgctgtaacaaatctcttcctatctgccccctccctctacccttcccagactctagtatcctctgttctttttacttctatgaaatcattttttttcttttagctttcacatgtgagtgagaacatgcagtgtttaactttctgttcctggcttatttcatttataatatgctccaattctttccatgttgctgtaaatgacaagatctccttcatttttatggctgaatagttttccattgtgtatttctaccacatttttttttttttttttttgagacagagtttcgctcttgtcaccccggctggagtgcaatggcacaatctcagctcactgcaacctccgcctcctgggttcaagcgattctcctgcctcagcctcccaagtagccaggattacaggggcccaccactacgcccggataattttttgtatttttagtagagacggggtttcaccatgtcggccaggctggtctcgaactcctgacctcaggcaatccgcctgtctcagcctcccaaagtgctgggattacaggtgtgagccactgtgccctgcctaaagccaacacattttccaaaaatccctggctgcctcaacagttttcggagtgctcttacaatcctcaggggtgctgtgtgtggggtgtgattctctattaatccaagctcctcataatctgataaatgctgcctggagttcatctccctcactaaactgtgaattcatgaatccatgcgtgcttcatgaattacagagattaagagtacatgctctagatttagaatgcttgggctaatccagccacctgctctcagttaaaccccatttgattgtattaatcttctgtgcttccatttcttcctgcatgaaatagcactaacattattctgttgtcgtgagtagcaaattagcagagaccttcgatcagtgcctggcaatacaggataaccatcactgattcatgcgtatatggaacaattatgtttatgtcttctgtatcccagacaagatgctggtcacaaaaatgaacaaagacaaacaattcctgatttcaaatgtcttgaggacagggtctgtgtattttcatatatttgtccccacaactcaggccagatcctgtcactatatattgcaattaccaataattttttacaaaatgaatgaacgaatgcgtgagtgaataaaagtgacatctgcaaggtgttcattagaaatcacaaaaataaaaaataaaaatataaaagtaacatgatcagaactgtaatgcaggaagattaatttagtgacttcaggattgtttcttttttttgagatggagtttcgctcttgctgcccaggcaggagtgcagtggcgcaatcggggctcactgcaacctctgcctcagcctcctgagtagctgggtttacaggcatgcgccaccatgcccggctaattttgtatttttagtagagacgggttttctccatgttggtcaggctagacttgaactcccgacctcaggtgatccgcctgcctcggcctcccaaagtgctaggatgacaggcatgagccaccgcgcccggccgacttcaggattgtttcaaaggaagataattggatgcatgaggctagcttaagattagtgaacttggcaactcagaagtaataagagcctttcatttagggtgtctggaaagaggagatgactggaaatgactataaaaataaaaagttcaggacgggcgcggtggctcatgcctgtaatcccagcactttgagaggccaaggcgggcagatcacgaggtcaggagatcaagaccatcctggctaacatggtgaaaccccgtctctactaaaaagtacaaaaaattagccaggcgtggtggtgggcgcctgtagtcccagctactcgggagtctgaggcaggagaatggcgtgaacctgggaggcggagcttgcagtgagccgagatcgtgccaccgcactccagcccgagtgacagagcgagactctgtctcaaaaaaaacaaatagataaaataaaaaatggaaagttcaggctgggagcaatggtttacacccataatcccggcactttgggaggccaagtgtgggcggatcacctgatgtcaggcgttcgagaccagcctggccaacaaggttaaaccccatttctttttttttttttaaatagtatttgcaccacaggtgctattgtttattttaattccaattaatcaagaattgccacacatgctaagaataaagctgttggatgtgaactaaggagcacgttgctattttattttagtgtccagatactcagctgggttaaaccccatttctactaaaaatacaaaagtgagctgggcatggtggcgtgctcctgtaatcccagctacttgggagggtgaggcaggagaattgcttgagcctgggaagcagagattacagtgagccaagatcgtgccactgcactccagcctaggcaacagagcaagaccccgtctcaaaaggaaaaaaaaaaacaaaggaaggaagttcgacttgtagaggatgtaacactcattgatggattgcctttgacggtggaggtagaaaggaggaagactgaaaatttcaaacacaggtatctggaaggatggtgattccattcatggacatagtggctccgggagaaaatagactttatttttttatatgttgagtttgccatgtcaggaagaaagaaaagagggaaagaatgctttgtataaccctattattattgttgttgttattgagatgtagtcttgctctgtcaccaggctggagtaccgtggtgtgatcttggctcactgcaacctctgctccaagggtcaagcaatcttcccacctcagcctcccgagtacttggaactataggtgtccaccatcatgcctggctttttttttttttttttttttttttttggtagagaaggggttttgccatgttgctcaggctgctcttgaacacctgcattcaagctctctgcccacctcgccctcccaaagtgctgtgattacagatgggacccatcgtgcctggccctaacattttttaattaatcaaaaaagaagaagagttgctataaatacttcatccatggtttaaagtgcaacctatatataagctgttgtcaggccaagtgcggtagctcacacctgcaattgtagcactttggaaggcctagatgggaggatcactcaagctcaggaattcaagaccagcctggacaacatagcaagatcctgtctccaccacacacaagaaaagataaataagccaggcttacttatggtgtgtgcctgtagaccccgctactagagaggctgtggcaggaggctggcttgagcccaggagttcaaggttgcaatgaactatgattgcaccactgcactccctcctgggtgacacagcaagaccctgtctctaaaaaataatatctttagcctggcgtggtggctcacgcctgtaatcccagcactttgggaggccgaggtgggcggatcacgaggtcaggagttcgagaccagcctggccaatatggtgaaaccccatttctactaaaagtacaaaaaattagccggacgtggtggtgggcacctgtagtcccagctactcatgaggctgaggcaggagaatcacttgaacccaggaggcagaggttgcagtgagcagagattgcacgactgtactccaacctgggtgacaaagcaagactctgtctcaaaaatatatatatatgtatatatacataatatgtaataatatatataatatttctattttagagacagggtctctaaagttacaacaccgtacatgtgtggaatatatttacatatattctctctctctctctctctatatatatatatatacacacacacatatatattctatatatacacacacacacacacacacacacacacacatatatatatatacacatctggtctcataattagcccaaatgagaactgggatgtgatcgcatctaactttccaaaaccatctccctgtcattcctataacctcccctttccatacttccagaggaatcacacccatggaaccaagaaaccaaaccagtgcatctcaattcatcctcctgggactctcagaaaagccagagcaggagacgcttctcttttccctgttcttctgcatgtacctggtcatggtcgtggggaacctgctcatcatcctggccatcagcatagactcccacctccacacccccatgtacttcttcctggccaacctgtccctggttgatttctgtctggccaccaacaccatccctaagatgctggtgagccttcaaaccgggagcaaggccatctcttatccctgctgcctgatccagatgtacttcttccatttctttggcatcgtggacagcgtcataatcgccatgatggcttatgaccggttcgtggccatctgccacccattgcactacgccaagatcatgagcctacgcctctgtcgcctgctggtcggcgccctctgggcgttttcctgcttcatctcactcactcacatcctcctgatggcccgtctcgttttctgcggcagccatgaggtgcctcactacttctgcgacctcactcccatcctccgactttcgtgcacggacacctctgtgaataggatcttcatcctcattgtggcagggatggtgatagccacgccctttgtctgcatcctggcctcctatgctcgcatccttgtggccatcatgaaggtcccctctgcaggcggcaggaagaaagccttctccacctgcagctcccacctgtctgtggttgctctcttctatgggaccaccattggcgtctatctgtgtccctcctcggtcctcaccactgtgaaggagaaagcttctgcggtgatgtacacagcagtcacccccatgctgaatcccttcatctacagcttgaggaacagagacctgaaaggggctctcaggaagctggtcaacagaaagatcacctcatcttcctgaccaccaggactcaggaacttctggggggtagaatatatacatctgggagtcttgggctaacatctggaattgcatgagttgaagagtaggcactttgaattttattattattattattatttagagatggggtctcactatgttgcccgtgctggagtgcagtggcgtgatcatagatcactgcagcttcaaacttctctctctgtgtgcattgttttactagagacagggtctcactaatttggccaggctggtctggaactcctgggctcaagcagtacttccccctcagcctcctaacatcctaggattacaggtgtgagctaccacgccgagcctcactttgaattttttgtttgtttttgttttttgagacagagtctcgttctgttgcccaggctggagtgcagtggcatgatcacggctcattgcagccttgacctccctggctgaagcaatcctcccacctcagccttccgagtagctaggaccataggcacataccaccatgctcagctaatttttgtatcttttgtacagacagggttttgccatactacccagccgcagaagtttcacgggaagtctcaggatggtctggtaactgtttttctttttgttttcttttttgtttttgagacagagtctcattctgtcacccaggctggagtgcaatggcatgatctctgctcactgcaacctccgcctctgggttcaagtgatcctcctgcctcaccctccagactagctggaactacaggcacccatcaccatacccggctaatttttgtatttttggtggagacagggttttaccatgtgggccaggctgttctcgacctcctgacctcaaatgatccacccaccttggcctcccaaagtgctgggattacaggcgtgagccaccaagcctggctggaaaggccatttgaggacacagcgaaagggggtctatctgccacggaagaaagacttcaccaaaaaccaatcccaacggcacgtcgatcttgggcttctgaccctcagaaccatgagacaatccacttcacttatttagccacgcagtctgcggtgttttgttataaccagccctggccgaataacacagtgactgtgaggggaggagtcttaggaagatgtcaacacgtgaaggagtgaaatgccgccatgtggttctgtggctggaccgactctgtctccaaactccgttaggaaagataatcattctggggctctgttgcccaggctggagtgcagcggcatgattatagctcactgcagtcttgacctcctgggctcaagcagtcctcccacctcagcctcccaagtagttgggaccagaggcatgcagcaccatgcccggctaatttatttttatttgtatatatttttttggtagagatggggtctcactatgttgtccaggctgctctcaaactcctgagctcaagccatcctcccatctcagcctctcaaaatgctgggattacaggtgtgagccaccacacctggccaaaattttttttttttttttttgagacagagtctcactctgttgcccaggctggagtgtagtggcactatctcagctcactgcaacctccacctcctgggttcatgcaattctccgcctcagcctccccagtagctgggactacaggagcgcaccaccacacccagctagtttttttgtatttttagtagagacgggatttcaccatgttggccaggctggtcttgaactcctgacctcaggtgatccacctgccttggcctcccaaaatgttgggattacagacatcagccaccacgcctggcccaatcattgtttttaccccttgtctttatatgagtcactaataaagcagaagtgtcccgggtgctgtggcttacacctgtaatcccagcactttgggaggccaaggcaggcagatcacctgaggtcaggagttcaagaccagcctggccaacatggcaaaaccccatctctactaaaaatataaaaattagtcaggtgtggtggggcgtgcctgtaatcccagctactcgggaggctgaggcaggagaatcacttgaacctgggaggcggaggttgcagtgggccgagatggcaccactgcaacctgcacttcagcctaagggatggagcgagactgtctcaaaataaataaataaataaataaataagttgaagtgtctcaagttgatataatgtggatgtttctctcctccagatcttatgttgaaatgtgatccccagtgtcggaggtgaggcctaggcagaggtgtttgattatgggggcagattcatcatgaagaatttagtgccctccccatagtaatgaggaagttcttgctctactacttcacaaagaccctggcactcctcccctctctctcttcctctctcaccatttgacttgccagctccccttgcccttccaccgtgattggaagcttcctgaggtctgcaccagaagtagatgatggcaccacccttcttgtacagtctgcagaactgtgagacaaataaacctcttttctttataaattacccagactctaggctgggctcagtggctcacgcctataatcccagcactttgggaggctgaggcaggcagatcacctgaggtcaggagctcaaaagcagtctggccaacatggtgaaaccctgtctctaccaaaaatacaaaaattagctgggcgtggtggcgcactcctgtaatcccagcttctggagaggctgaggcaggagaatcacttgaacccagggggcagaggttgcagtgagctgagactgcaccactgcactcctgcctgggcgacaagagcgacactctgtctcaaaataaataaataaataaataacccagactcaggtattccttgtagcaacacaaacactgatatagaagtcttcctaaatacgtaaataaatatgataatgctaacttaaaaaaatttttttttgagaaggagtttcactgtgtcacccaggctggagtgcaatggcgccatcttggctcattgcaacctccacctccccggttcaagtgattctcctgcctcagcctcccgagtagctgggattacaggtgtgtgccaccacgcccagctacttttttgtatttttagtacagacagcatttcaccatgttgcccaggctggtctcgcactcctgacctcaggtgatccacccgcctcggcctcccaaagtgctgggattgcaggtgtgagccactgcgcctggccgataatgctaactttataggggagcaaatagagcttggaacagtgaaataaagtgtcaacaattatacggttatttacaaagcacaggtgggattcaaagccagttggtctgattccaaattctcacccttaaccatgatgatcttctcttgtatttgaagaccttaatcaggttttccggatcattcattatgaatttctcttttgtatatttcacagcttaaagtccgaagtagctggcatgttagtggaatgatgacactctagaaatgggtttctgagaggtgagatccacagggagaaaaggccggtgcagtggctcatgcctgtaatcctggcactttggaagctgaggcgagtggactgcacgagctcaggagtttgagactaccctgtgcaacatagtgaaaccccctctctacaaaaaatacaaaaattagccagatgtggtggtgtgaacctgtagtctcagctactccagaggctgaggtgagaggatgcgtcacctgagcctggggtggttgaggctgcagtgagccatgatcacaccactgcactctagcctgggcaacagagtgagatcctgctaaaaaaaaacaaaacaaaaaaacaacaacaaaaaaaaaacacacacacacataaattgcctagtaggaaactctcatccttgtttattttatttatttatttatttatttattttgagacaaagtcttgctctgtcgccaggctggagtgcagtggcaagatctcagctcactgcaacctccgcttcccaggttcaagcgattctcctgcctcagcctccggagtagctgggactacaggtatgtgccaccatgcccggctaatttttgtatttttaatagagacagggtttcaccatgttggccaggctggtcttgagctcctgacctcaggtgatccgcctgcctcagcctcccaaagtgctgggatttcaggcatgagccacagcgcccggcctcatcttccttctgtactggattcaacacctctttctctacatacctttaaaggtgtcctcactttagcaaacaatatcagaaagattaatactacatttcagcttaaaaataaaattaattcataaggatgtgtgtatttttaaaaattttacattcctgcataagaatatgtggtattactttctcttgcattcaaattgtctctttcattctgagaatgccaccagatgatgaaaagcatgacaacttttttttttttagatggagtcttgctgtgttgcccaggctggagtgcagtggtatgatcttagctcattgcaaacctccgtctcccgggttcaaacgattcttctgcctcagcctcccagcctgggtgagagtaagacccttctcaaaaaaaaataaaaaaggaaacaacaatcagggcacaaaattcgttcatgaagtttcaacttttacaatgtcaaaaagaataaaatttgattaataaattgtctagggctataaacaacatgcatattaaaaggacagatttgtagggcaaaaatgtacaagactgtcaatcaaatactaattaataaaaaaatcactaatcaaatacagcatcaataaaattcctgtctccatggttacattacttcttccttttctttgtgtttcctccacttctgtctttttttttcttttttttttttttttgtttgagactgaatctcactctgttgcccaggctggagtgcaatggtgcaatcatagctcactgcagtctccaactcctgggctcaagcgatcctcccatttcagcctctcaagtaattgggactacaggtacacaccactgtgccaagctaatttttaaaattttttgtaacagggtctgattttgttgcccagctgggttcaaactcctggcctcaagcaattctcttgcctcagcctcccaacgtgttggaattacaaggatgaaccactgcgcctggcctccacctctgcctatcttataagaaaacatgtggttacatttagagcctgcccaggtaatccagggtaagctgcttctctgcaaagacccttttcccaaataagtcacattcacccttttgtcatatgatttaaggccaggtgcggtggctcacgtctgtaatcccagcattttgggaggctgaggcaattgtatcacttgagtccagaagttcaagaccagcctggccaacatggcaaaaacccatctctactaaaaatataaaaattagcaggctgtggtggcaggcacctgtaatcccagctactcaggaggcagaggaaggaggatctcttgaacccgggaagcggaggttgcagtgagccgagatcacgccactgcactccagcctgggcgacagggcaagactccagctcagatagatagataaataaataaataaataaataaataaataaataaataaaagctcagattcacaagcgagaggattaaaatgtggatatagtcttctgagggccatgagccaactcatgacagaaatgtcttctggttgactccatgaaagttatctattatcaatggacccagggaagggttctccattttctgtctctgggaatcaggtctagatatgtctcttgcattgactgcaactacctgttgcagtcagaggaaaaccagtgctggggggagggaacctcgtgaaggactgaatgaagccctctcctattcgtgcacattccttaattctgaggtccttgtaatgaaagagaactgtctttactgtttgagcatattagagttaggggtgctatttatttatttatttatttatttattttttgagtcttgctctgtctcccaggctggagtgcagtggtgcaatctcggctcactgcaacctccgcctcgcgggctcaagcaattctcctgcctcagcctcccgagtagctgggattacaggctccagctaccacacatggctaacttttgtatttttagtagagatggggtttcaccacgtgggccaggccagttttgaactcctgacctcaagtgatccacccaccttggcctcccaaagtgctgggattacaggtgtgagccactgtgcccagcccagggctcctattctttaaactggaacctaaggtatcctcacttatgaagttcaaatatctcacaataatctcaaatcactaagataatctaatcatgctaattttttgatgataaaactgagtataatagatgctaatgttgtctagggagaatatagtttaccagtgactggtcccagtagttactaaattgggtatgaaaacttagctcccttgacccactgtaggtctacactggggtgcaattgacaagaccctaaatacgcaataaggtggaagcttgtctccagatataacaacaacctcgcttaaatccttttcctggcagcgcacagtgacttcaccactaatctcagatctttgggaggccatggcaggaggatcacttgaacctaggttttgagaccaacctgggcaacatagccagagtccatctctacaccacaccccacactggacgtggtggtgcatgcctggagtcctagcttcctaggaggctgaggtaggagggtccctggagtttgagccctggagtcctggagtttggggctgcagggagctatgatcatgtcattgcattccagcctaggtgacaaagcaagaccctgtctatggaaaaaaagaaacaaaaaacaaaactgcccagctacttgggagcctgaggtaggagaatcgcttgaacccagaaggcggaggttgcagttagccgagattgcgccattgcactccagcctggtggacagagcaagactccgtctcagcaaaacaaaaaacaaaaaacctaaactaaacaaaaaaccaaaaatacattttcctgacctatcctcctgaactatctaccttccacaacttttcttcttctgagactaatccattaaaaaaaaatcacttagccaggagcggtggctcacgcctctaatcccagtaatcccagaactttgggaggccgaggcgaatggatcacaaggtcaggagatcgagaccaccctggccagcatgatgaaacctcacctctactaaaagtacaaaaattagccgggtgtggtgtcgtgcacctgtagtcccagctactcagtaggctgaggcgggagaatcgcttgaacctgggaggcagagattacagtgagccgagatcacaccactgcactccagcctggccgacagagcgagactctgtctctaaataaataaataaataacttgggctcagcctctgagtctatggcctgagcaaagaaattgagtctagagaattaaaatcacatgtccatcatcacagatccagacataaaaagcaaagtcagatttcaagccggagtggaaatgtagttggcttttatgtcatctagacattttagaagaacttggtgatgaaagagtcaggcaggctgggcgcattgtctcacgcctgtaatcccagcactttgggaggccgaggcgggtggatcacctgacgtcaggagtttgagaccagcctggccaacatggtgaaactctatctctactaaaaatacaaaaattagccaggcatggtggcaggcgcctgtaatccccactactcaggaggctgaggcaggaggatggcttgaacccggaggcggaagttgcagtgagccgaggtcgtgccattgcactccagcctgggagacagagaaagactccatctcagagaaaaaaacaaaacaaaacaaagagtcaggcattctagctcaccaggaatcctgtcactttgacttactctagaaacctgaatccaaagcaaatggcacaccacagaagagaaggtatcctccctatgaacttcctcaaggttcctttcatgtccttattcctcagactatagataaaggggttcaccatttgagggaacacagaatacatcactgaagccactgcagtcttcctaggtgagtcagtaaccacagaactaatgtacacccccaaacctgccccatagaacaagagaacaatggagaggtgagacccacaggtggaaactgctttgtgctttccacttgctgatggcattctcaaaacacaggaggtgatctgagtgtaagacaaaatgattccagacagaggaacaccaccaaatatgcaagctgcaaaatatatcaggatgttattgatgagggtgtctgaacaggtgagttggatgacctgagccagttcacagaagaagagcgggatttccaggtctgtgcagaaggacagcctcaacaccatcaggctgagaagaagggcattcacaacactagtcaacagagagagaagaatcagcaggccacagaggcgggggttcatgatgactgtgtatctaagggggtgacaaatggccacatagcggtcataggccattgctgcaaggagacaattttccaagccagcaaaaaacaagacaaagcagatctgggtgaggcagcctgagtacgtgatgctccgattctgagcttggatgttcaccagcatctttgggatcgtggttgtgcttaaacaaatgtccaaaaaggagagattggagaggaagaagtacatgggggtgtggaggtgagagtcagagatgacagccaagaggatgagcaggttccccaggatggtgaccaagtacatggacaggaacaggctgaaaaggacgggctgcagttccggatcctctatcagtcccaggagaaggaattttgaaatagctgtttggtttctcgcttccatgctgttgatgatgaatctgatggaaaagataataaaatctgtaagcagcagctgcatcggcatcactcgagaacatgacagaaacgcaaaatcttgctcccctccccagacttcttgctgataaactctggggatgagaaccgacagtttattctttcacaagccttgtagatgtttttgatagatgctgaattttgagaaacagttcaaaacatttacttaggaatggagttttcttaatcaaaaaatgtggaaatctttttttttttttttttttttttgagacagggtctcactctgtccaccaggctggaatgcagtggtgtaatcttagcttattgcaagctccacctccatgttcaagtgattctctggcctcagcctcccaagtagctgtggttacaggtgcacaccaccattcctggctaattttgtgtgtgtgtgtgtgtgtttttagtagagacggcgggggtgggggtctcaccatgttggtcaggctgatctcgaactcctgacctcaagtgatccacctgcctcagcctcccaaagtgctgggattacaggcttgagccaccatgcctggcccaggagtggagttttcttaatcaaaaaatgtggaaatgttttttttttttttttttcgggagatagggtctcactctgtcgcccaggctggagtgcagtggtgtgatcttagctcactgcaagctccacctcccaggttcaagtgagtctccttcctcagcctctcaagtagctagggttacaggtgcacagcaccatatttggctaattaaaaaaaaattttttttttcgtatgtttagtagagacagggtctcaccatgtaggtcaggctggtctcgaactcctgacttcaagtgatccgcctgcctcaggctcccgaagtcctgggattacaggtgtgagccatcacgctcggccaaagaatgtggaaatcttttatctttattctttctgctgttcccttacccatggcagacacttctagtctagtctagtgctctttcctgctaagaccacatgtacctttgggattcttatcagcatagagctccaaacagcgctagagatagacagaaagtcagagttagcatgctaaatattacctatttgtcatctttcacatgtgattttctaagacaatcatccaattttcaatgttacccaaaacaaatgaatatagaaacatactgcaacattgctaacattttgtcagtttgtgtcattcttaaacttttaaaaatgataaaacttgacatttaaaaaattttaaaattcttggtggggcgtggtggctcatgcttgtaatcccagcactttgggaggccgaggcgggcagatcacggggtcaggcaatcgagaccatcctggctaacacggtgaaaccccatgtctactaaaaatacaaaaaattatcggggcgtggtggtgggcgcctgtggtcccagctactcgggaggctgaggcaggagaatggcgtgaacccaggaggcagagcttgcagtgagccgagatcgcgccactgcactccagcctgggcaacagagcgagactccatctcaaaaaacaaacaaacaaatttttaaattctctagtgtgcactgtgaacccaagtgaatattcaaatccttccccttgcttactttcttcctacatttcttttctctctcctcctgttccctccattttcttttctttttttctttttctttttctttttttcgagatggagtcttgctctgtcacccaggttagaatacagtggcgcgatctcggctccctgcaacctccgcctcccgggttcaagctattttcctgcctcgtcctccaaagtagctgggattacaggcgccagccaccgcacccggctaatttttgtatttttagtagagacgggtttcactatcttagccagactggtctggaactcctgaccttgtgatccacctgcctcggcctcccaaagtgctgggattacaggtgtgagccactgcgcctggcctctccattttctttattgaaacaaattattataagacactaactcaatttcatttcttcttctacgtgctgagaataaaacaaggtataaaacatgattatccacatcaaaaaacttatccaccactatcaaatagactttaatccctctgatgcaagattggttcaacatacagaaatcaataaatgtgattcatcacataaaaagaactaaacccaaaaaccacattattatctcaatagatgcaaaaaaggcttttaataaaattcaacattgctttatgttaaaaaccctcaacaggctgtgcgtggtggttcacgcctgtaatcccagcactttgggaggctaaggcaggcggatcatgaggtcaggagttcgagaccagcctagccaacatggtgaaaccccatgtctattaaaattacaaatattagccaggcatggtggcatgcacctgcaatcccagctacttgggaggctgaggcaggagaatctcttgaacccaggaaatggaggttgcagtgtgccaagattgtgccattgcactccagcctgggtgacagagtgacactctgtcttaaaaaaaaaaaaagtttagcttgttttttaacaactgatgtatgattcacaaaaaaaagagagaagggaagagaaagagagagaaaaagaaaaggagaaagaaaggaagaaaggaagaaaatttttgtatgataaacagtgtacagtgtgagaaaaattctaaacgtttttgaacctgcacagatatattcatttttattatagattattcatgtgtgaattattcagaaagtacggagaataatgaagggctggctacccatcagtcaacgatataagattcacacaaggccaggcgtggtggctcaagcctataatcccagcactttgggaggctgaggcaggtggatcacctgagatcaagagtttgagatcagcctggccaatatggcgaaaccccgtctttactacaaatacaaaaaaattagctgggtgtggtggtgtggtgcacgcctgtaaccccagctacttgggaggctgaggcaggagaatcgcttgcacctgagaggcagaggttgcagtaagccgagatcgtgccactgcactccagcctgggtgacagagggagactgtgtctcaaaaaaaaaaaaaaaaattcacacaattcaccatccttgattagatatttttattgcaaaaagtaaaaaatatttttattgcaataaagtgtgtatttgaggctgggcatggtggctcatgcctgtaatcccagcattttgggaggctgaggcaggtggatcatctgaggtcaggagttcaagaccagctgaccaatatggtgaaactccgtctctacaggagaatcgcttgaacctgggaggcggaggttgcagtgagccgagatcatgccactgcactccagcctgggtgacagagcaagattccatctcaaaaaaaaaaaaaaaaaagtgcatatttcaaaaccaccgcttcatgtttttgattttttttcccttccctaggggaaccagtacacacacttgatctatattattcttctatacctttcattatatttgatattattcttccaaataataacaatggcattgtgttgcattttaaaagctttatatagccaggcactgtggctcacatctataatccgggtcctttgggaggctgaggcgggagtacaagaggccaggagtgtaagaccagcctgggcaacgtagtgagaacctgtgtctacaaaaaaaatttaaaaatttgcaaagtgtaatggcatgcacctgtagtcccagttactcagtaggctgaggctgaaggattggttgatccaggaattcaagactgcagtgagctatgatcgagtcaccacactccttccaggcaacagagtgagaccttgtctctaaaaaaaccccaaaaaacaaaaccacctgccctcatttccaaagcattaattaactaaaggactttgggttaactgattggcttcaacaaaaatgatgctcaacaactcacatggatattgcagaggatgatctatcctcaggaagtgcagacagactcgagtcctggtcaaaaatatcatgtctggaaggaggttctgatgcagcttccgagctgggtaagagatgttcagtgaggtgcttacagcctgacttgttgcactgtctatatccctgggacctcaatatccaacgctcctcattacactggctattttaccatcgttctgatcccaggagtgcacatccttaaagaccaagactagaggagtgaggaattcgggatggctgagtccctgtcccctgaggccacgtgtacaccatccatatctctccattgtttctgctcacctccacttcacgaatcttgctcccagaacacataccattcgtctagtaaaaaaaaggattttgatctgaagaatgtgagttctcttcattgtcagacccggaaagacattaaaatgagacagaaaccacacccctcctcccctcctttgaactatgcattcatctcataaaactgcttgctgttgccacaagtagctataaattaacctaataatagcatatgaattaaaaagaaattatttaggcagttagtgagggtacagaagtcctgggtaaggtttttctttttaataaaaagcagcccccaaatcatttcttttcaggcaaaaagtagcctgaaaaatcaagctgcaagcataggtaagcaagctgaaagcctgcgtaggtgaatgccagcagctgtgccagaagacaggtataaccaacatgaaggttttcttttttcttctttctttctttcttattcttttttttttttttttttttttttttttgagacagtctcactctatcacccaggccggaatgcagtggcgccatctcagctcactgcaacctctgcctctgggttcaagtgattcttgtgcctcagcctccagagtagctgggattacaggcgagtgccaccacacctggctaatttttgtatttttagtagagatgagatttgatgctgggcgtggtggcttatgcatgtaatcccagcactttgggaggctgaggtgggtggataacctgaggtcaggagtttgagaccagcctggccaatatggtgaaaccttgtctgtactaaaaatacaaaaattagccaggcgtggtgacaggcacctgtagtcccagctactcgggaggctgaggcaggagaatcgcttgaacccaggaggtggaggttgcagtgagctgagatcgtgtccctacactccagcctgggtgacagagcaagactccatctcaaaaaaaaaaacaaaaacaaaaacaaaaaacccttaacctgtaagccatctgcaagtttgggtcttacatgtaaactagctgggcacagtggctcacgcctgtaatcccagcactttgggaggctgaggcaggcggatcacgaggtcaagagttcaagaccacaatgaccaacatggtgaaactccgtctctactaaaaatacaaaaattagccagccgaggtggcgcacacctgtaatcccagctattcaggaggctgagacaggagaatcgcttgaacccagaaggcagaggttgcagtgagctcagattgtgccactacactccagcctgggcgacagagcaagactccatcttaaaaaaaaaaaatgtgtaagctgccccaattttccttgcttcgttacctgtcttttaaggttcttcaatctctgaccacacaggtagtatctggcaagcaacagtattcaacctgagatttcaagatgttatgtccattatgccagtaataataatctgtgttcccccagttgatctgtcaatctaaaataatcaaaagggtcagaatctagtttgttttattatttttagagacaggatctggctctgttgccccggctggagtgcagtggtgcaatcatagctcactgcagcctcaacttcttgagcccaagcgatcctcccacttcagcctcccatgtagctgggactacagatgtgcaccaacacgtctgagtaattttttattttttttttcagagagatgggggtctctctatgttgcccaagctggctttgaactcctgggctcaagcgattttcccacctcggcctctcaaagtgctggtattacaagagccaccacacccagccagaatctagtctaaagacagtttattcaagcacgatgtctgagacaagtcaccagggaagcacagcttccaaagaagggaagtgagtgtttcaaggtgcaaaagtttgagattgtttatgtaggcaaaattcagggaagtttaacagaatttcttttttctattttttttttttttttttttgagacacagtcttgctctgttgcccagggctggagtgcagtggtgtgatctcagctcactgcagcctccgccttccaggttcaagtgattctcgtgcctcagcctcctgagtagctgggattacaggcacctgccaccacgtccggctaatttttgtatttttagtagagatggggttttgccatgttggtcaggctggtctcaaactcctgacctcaagtgatccacctgcctctgcctcctaaagccctgggattacaggtgtgaactactgcatgaagcccagtttaacagaatttcaacatctttaaggcttaatgcatagttacaatatttggtattattcttctaaacagtaacaattgcattgtgttgcattttaatgcaactgattagtctgggtggttttttcttttagggaaggtgtatttaacattttacaatgatgacataacagtcgtggggtcctgtgtaccatctggtctgagttaggtacaggacagtaaaggaggcagttaatctataacaaaggtcagtgactggaagcagggagatctggtctctggtctctcccagtgctttatagaacaagaaccacaaagaagagccattatggaaaacagtatagaggttcctcagaaaactaaaaatggaattacgatgtgatccactaatcccaccatggagaatgtctccaaatgactgaaactaggattcacgacagaaaaatcaactggacacagaacaaggcagtaatcgaggaaacagaaaactgaaacgtataaaacacatagaacacagcaatggcagaattaagtctctcctaatcagcaatcatgttaaaaaataaaaggattggccgggtgcggttgctcacacctgcaatcccagcactttgggagattgaagtgggtgaatcataaggtcaggagatcgagaccaatctggctaacatgatgaaaccccgtctctactaaaaatacaaaaattagccaggcgtggtggcatgcacctgtaatcccagctactcgggaagctgaggcaggagaattgcttgaaccctggaggccgaggttgcagtgagctgagatcacaccactgcactccagcctgggtgatagaatgagactaaaaaaaaaaaaaaaaagataaaggattaaactatccaaacaaaaggcagtatttgtcagcataaatactaaaaattgattcaactatatttagaagagacttgttttagactcgagacaaaacagggtaacagtaagagtatggatagacagatgtatttcatgcaaatagtatgcagatgacagctgcggaggctgcactaatatcagaagacagaataaagtcaaaaccattaaatcagtcaaaggaggacatatatatacatatactcttcctgcttttttgtggttatgaaataagcgatgtcactaccttgctaacttttcttttctcctgtcttatttcacactcaatatcttcttctctaactaaagtacttctccatggtagaactgtccttgtaaagaaacattcgaaaggttttcatgacagccccaaggcagcagtgagtcctctaacacggcaatgatagaattacttttattcaatgatgattctttttctttctttctttctttctttctttctttctttctttctttcttcctttctttccttctttctttccttctttctttcttcctttctttctttccttttctttctttctctctctctttctttctttcttgtctttttttttttttaatttattttttgagacggagtctcgctctgttgccaggttggagtgcagtggcactatcttggctcaccacaacctcagcttcccgagcagctgggaccacaaggtgcccgctaccatgcccagctaatttttaaatttttagtagagatggggtttcaccatgttggccaggctgatctcgatctcctgacctcaggtgatccccctgccttggcctctcaaagtgctgggattacaggcgtgagtcaccgtgcccagccaagtaagatttttcttttggtctccaaaggagatgggttagaatcatagcaagggaagatgactgagggggaaagcgagaacttagataacattcttacaaataaatcaatgggactgttctaaaccaagtaagatgtcaaaaaaagatgatcaacctttgtccttcctacctaataattatttattttattctacaattcaggtttaataagtggatgataaatgcaacaaggggaacaattctaatttctaaaacaagagggaaaaatatgtgagaacaatagcattataggatttatgattatagactggttatggaacacaatgattccacattattatactgaatacttaggaggtgctgggcattgaattaagtgtttgtagtgcttatcagagtggagttcccagccgggtgtggtggctcacgcctgtaatcccagcactttgggaagcagaggtgggcagatcacctgtggccaggagttcgagaccagcttggccaacttggggaaaccccatctctactaaaaaaaaaaaaaagaacaaaaattagctgggcatggtggcgcatgcctgtaatcccagctactcaggaggctgaagcaggagaatctcttgaaccagggaggcggaagttgcagtgagcctagattgcacctttgcactcctgcccaggtgacaggctccatctcaaaaacaaacaaaaaaacaaacaaccaaaaaaaccaccaaaaaacaccagagtggacttcccaataggaattatactttatatggtcagtctaaggctctcatactaatcatttccccctcaccaggaattagattaagaaaaaatatatgatctatctctctgtggtgagattaaaggtgatatcttttggattactctatgcaatcccatttatcaatagatctgggaagaagagtcagatttctgtctctgggcatcatgtctgggtattacgtctgtatttgctacagccatctgggtccatgaggggaaccagccctaaaagaaagccacagccgggcacggtggctcacgcctgtaatcccagcactttaggaggctgaggtgggcaaatcacttgaggtccggagttcaagagcaccctggccaacacggtgaaaccccatctctactgaaaatgcaaaacttagccaggtgtggtggtgtgcacctgtaatcccagctacttgggaggctgaggcaggagaatcacttgaacccaggaggcagaggttgcagtgagctgagattgtgccactgcacttcagcctgggtgacagagccaggctgtctaaaaaaaaaagaaagccaaaagaagaaggagtaagtgaattattctctacattccctacctctgatatatttgcaaagaaatgtagctctctttattatttgagtatattataatcaacatttctttcactaaagccgacttcttcactgatcaagatagaatatctcaccactaggccgggcacagtggctcacacctgtaatcctagcacttttgggaggctgaggtgggcggatccaaaggtcaggagtttgagactagcctcgctaatacggcaaaaccccatctctactaaaaatacaaagattagccaggtgtggtggcagctgtctgtagtcccagctactgaggaggctgaggcaggagaatagcttgaatctgggaggtggagtttgcagtgagctaagattgcaccgctgcactccagcctgggtgacaagagcgagactctgtctctcaaaaaaaaaaaaaaaaaaagaaagaaagaaagaaagaaaatctcaccactgaaataatctaatgatagcaattttattgatgataaaactgagggtagtaagtagacgttgatgttgacctgcacagacagtttagcagtgaccgggctctaaaattacagaattctggtatcaacaatcagctcccattttgcacaataggtttcactctggcatgcatttcatatggccctaaatattcaatcaggcagtatcaattctgtgttgcgaacacagccttctttggattcttgccctgacctgtgagacgcctcctgcttttcttcctctgagaatatttaccaaccaaatcactgtaacacttgccacaggttaactttttaaacaccgcatgcaaagaaactgagctttgagaatagaattcatttttgacacatgacagagctccaaaagaggcaagatttcaacaacaacaacaaaaaacacacacacacatccatgatgcagactagtcactttaagaaaatcttgaaaggtcgggcgcggtgactcacgcctgtaatcccagcactttgggaggccaaggtgggcagatcactaggtcaggagattgagaccatcctggccaacacggtgaaaccccatctctactaaaaaaatacaaaaaattagcctggcatggtggcgggcgcctgtagtcccagctactcaggaggctgaggcaggggaatggcgtgaacccaggaggcggaggttgcagtgagcggagatcgtgccactgcactccagcctgggtgacagagcgagactctgtcacaaaaaaaaaaaaaaagaaagaaagaaaaagaaaatcttcatgatgcaagagtcaggcactctggcttaccaaggaatcctgtcatgttgattccttttagaagcttcagttcaaagcagagcacaaagatcacaaaaaagaaagtaggtcaggcatagtggctcatgcctgtaatcccagcactttgggaggccgaggtgggtggattacctgaagtcaggagttcgagaccaccctggccaacctggtgaaaccccatctctactaaaaatacaaaaaaaatccaggtgtggtggtgtgtgcctgtaatcccagctactcgggaggccgaggcaggagaattgcatgaacccgggaggcggagtttgcagtgagccgagatcgtgccactgtactccagcctgggcgacagagcgagattctgcctcgaaaaaaaaaaaaaaaagtaaatctcgatgcaagagtcaggcactctggcttaccaaggaatcctgttatgatgatttattttagaagctccaattcaaagcagaggacaaagatcgctaaaaaggaaacagcctaccaataagtttcctcaaagctttcttcatctccttatttctcaggctgtagatgaaggggttcatcatttgagggaccacagtgtacatcactgaagccacagcagtaattcgggaagactcagcaacagcagaactaatgtacaccccaaaagctgtcccatagaacaaggaaaaaacagagaggtgacagccacaggtggaaaacgctttatactttcctcttgctgatggcattctcagaacagaggtgactatttgagaataagagaaaattattccagagagaggaattgcaccaaatacactacttgcaaaatatatgaggatgttgttgatgagggtgtcagaacaggcgagcttgatgacctgaacgacttcacagaagaacaaagggatttcaacgtttttgcagaaggacagctgcaataccatcagactctgaaccagggcatccatagtgctcatgaacatggagagaagaatcagcaagccccagaaatggacattcatgaggactgtgtacctcagtgggtggcaaatggccacatagcggtcgtaggccatgactgcaagaaagcaactttccaagccagcaaaaaccaagacaagacagatctgggtgaggcagcctgtgtaagtgatactctgattctgagcttggatgttcactaggatctttgggactgtggttgtggttaaacagatgtcagtaaaggagagattaaagagaaggaagtacatgggggtgtggaggtgggagtcagagatgacagccaggagaatgagcaggttccccaggatggtgaccaggtacatggacaggaacaggctgaaagggattaacttcagttctgggtcctctgtcactttcatgagaagaaattctgaaacagctgtttggtttctgggtcccatgtttttgatgatcaaaaaatgggataattagacaatcaaatgtgttttctagactgcgggagcaacgtcaacagaggcaaacaccatcttgaaaaggggtagattctaagggaagaaaataaataagtgttgccttttgtattgatattactttactgcttttacaaaacttgaagctaatacagcacagcatcaataattgttaattctggaaatggttaaggggtcatcattttttatttttatttatttattttttaaatttatttatttatttttgagacagagtcttgctctgtggccaggctggagtgcagtggcttgatcctggctcactgcaacctctgcctcctggtttcaagcaattctcctgcctgagcctcccaagtagctgggattaaagatgcttgccacaacacctggctaatttttgtatttttagtagagacggggttttgccatgttggccaggctgctctcaaatgcctggcctcaagtgatctgcccaacttggcttcccaaaatgctgggtttacaggcgtgagccaccacgcccagcctcatctttttttttttgagatggagtttcgctcttgttgcccaggctggagtgcagtggcacaaacttggttcactgcaacctccgcctcccaggttcaagcgattctccttcctcagcctcctgagtagctgggattacaggcatgtgccaccactctgctgttctgattattaaaaatatttggtaatgaaaaaacaaaaaataaataaaataaaacaaagtacataccaggaaaacggctggaagactctgtctggacccccagagacttcacgccagccaacagaaataatacaaagctgtgtcaagaaccaggaaaggagaatcgcttgaacccagggggcggaggttgcagtgagctgagatcatgccattatactccagcctgggcaacggagcaaaactccattaaaaaaaaaaaaaacaccacaggaaagtgaagataaggtgaagtttagcaagctgctcacctcctctcccccacaagactgcaagtaaattacagagaattttataacagtcatcctgttttcaaagaaaatggtaactacagaattcaggatagtgtatttgttgctggaagaaaacaaggtgatttgagtagaaaatcctacaggtaggttctatggtgatgacattaacttatttttaatgccagataggtatatgcggttttatcatgttactattctctcagaattacagatagatttttttttttttcctgagacagtgtctcgttctgtcgcccaggttggagtgcagtggcacgatctcggctcacagcaagctccgcctcccaggttcacgccattctcctgcctcagcctcctgagtagctgggactacagacgcccgccaccacggccggctaattttttgtatttttagtagagacgggtatcactgcgttagccaggatggtctccatatcctgaccttgtgatctgcccacctccgcctcccaaagtgctgggattacaggcgtgagccactgtgctctacactacctacagatagatagattttatgcattactttgtatatgataatgtaacaagtatgattaaagaaagacccttcatattctaaccctaaatatgttttctcatgttctcctaatattaaagttaggagtgtcaggcttcagaggttatcagcatctctccaagtgcttattaaaaattctcatacctcacacatttctcagagatttaacaccagtagttctcgggcaaggccaagaaccttctctatgaggaaaggtctcgggtggttcctctctgtgtctgttctgtggacaccaacagaggaatctcagtcctaggagactctatgagtgctagaataggagctgcgttccagatatgtaagagctttttgttttgttttgggggttttttagagacaggatcttgccatgttgcccaggctggtctcaaactcctggcctcaagcaatcctcacgcttcagcctcccaagtagctgggactacagccacgagccaccatgcctggcttcccagatattttggtgaaaataaagccagctcctcaagctccaaagacagctgcaacagaagactctccacccactcctttgattctcttttgacacctccattgtttgctcctcacacttagagagataattctgactgatgatcctgcgtgtgtgtgtgtgtgtgtgtgtgtgtgtgcttatagaaaaaaattatgccccaaaatcttgccaacttccattttctcctgtcttgtcttacactcgacatctccttctcaaatgaaagtatttctctacagagtaatcttcctagtgaagacacagtaaacagttttgcacgggagcactgagactacagctaatcctaaaattatacaattagaatatatttgtgtaatatacatataattatacatatagaggattatatatatatgtatatctccaggtgtggtggcactcactcatttgtagttccagctactcagggtcgctgaggcccaggagttcaaggctgcagtgagccatgatcgtggcactgcactccagcctgagtgacagagtgagaccctgtctctaataaacaagtaaataaaaataaaatttaaaaagaaaatttctattacaaatagactctcttcacagcagacctacagaaagaccgtcggttttctctgagcaccatgtctgaatatgatgcctacatttctgcagacatctgtttgcaagaggaaaatcagcacagacatggagccatcttcccgaggcttgcatgaatccccacactactgctcccatgcatttcttacccctgaagttcttgtcataaaaaataactctgtttcttattcatgtaaattatagtcagagtttctttctcttataagaaataaaagcttctggctgggcacagtggctcatgaatgcggtggtcactggtacattgtagtctctgcctccctagcggctcaattgccaaagctcctcattagccaaggaatttgtgttggcactgtaatcccagggtgcttaaatccttgcagaacaagggagaaattcaggatggctgctgtcctgaccctagaggccaagtgtacatcatccacttttctttttttctttctttttttttttttttgagatggagtcttgctctttcacccagcctggagtgcagtggcgcaatctcggctcactgcaacctctgcctcctgggttcaagcgattctcctgcctcagcctcccaagtagctgggattacaggcgcctgccaccactcccagctaatttttgtatttttagtagagatgggatttcaccatgtttgttaggctggtctggaactcctgacctcaggggatccacccacctctgcctcccaaagtgttgggattataggcatgagccaccatgcccagtctattttatttttttaatttttattttaattcaggggcacatatgcaagtttgtacataggcaaacttgtgtcatgggagtttgttgtaccaattatttcattacccaggtattgagcctggtacccattagttatttttcctgatccctgcctcctccagcccttcacccttcaataggccacagtgtatgtttttcccctctatgtgtccatatgttctcatcatttagctcccacttataagtgagaacacgtggtctttggttttctgttcctacactagtttgctaaggataatggcatccagctccatccattttcctgcaaagaacatgatctcattcttttttatggctgcatagtattctatggtgtgtatgtaccacattttctttatccattctatcagtgatgggcatttagattgattccatgtctttgctattgtgaatagtgctgcaatgaacataatgtgtgcttgtgtctttatagtacaatgattcatattcctttgggtacatacccagtaatgggattgctgggtctaatggtattctgtctttaggtctctgaggaattcccacactgccttccacaatggttgaactaatttacactcccactgacagtgtataagtgttcctttttctccacagccttgccagcatctgttattttttggctttttagtaatagccattctgattgatgtgagatgatatctcactgtggttttgatttgcatttccctaatgatcagtgatattgagcttttttttatatgattgttggccgcctatatgtcttcttttgaaaaatgtctgttcatgttctttgctcactttttaaatggtttttttttcttgtaaattggtttaagttccttaaagatgctggatattagaccttcatcagatggatagattgcaaaaattttctcccattctgtaggttgtttgttcactgtgatgatagtttctttcgctgtttagaagctctctagtttaattagatcccatttgccaatttttgcttttgttgcagttgcttttggtgtcttcatcatgaaatctttgctcgtgcctatgttctaaatggtattacctaggttgtcttctggggtatttatagttttgggttttacatttaagtctttaatctgtcttaagttaatttttgtatataatttaaggaaggggtacagtttcaatcttctgcatatggctagccagttatcccagcaccattgattgagtagggaatccttttcccattgcttgtttttgtcaggtttgtcaaagatcagatagttgaaggtgtgcggtcttatttctgggttctctattccgttccattggtctatttgtctgttcttgtacaagaaccatgctgttttgattactgtagccctgtagtgtagtttggagtcagatagtgtgatgcctccagctttgttccttttgcatagggttatcttggctattcaggatttttaaaaaacagttatttctagaaatcattttaaaagagagtaaaatctttttctggaggtgtgtaagctacttcagttgcttcttggatgtgagcctttggttgtagctattttttgataaattttctctgtttttttcttggttgttactggcactactattacatgaatatttatgattatgtcacactaaaatatgtctttgaaccagaaattaataaaagttttctcatcttattgctttatcacattgaaagtcacaaaaattagttttatttctatttctggttctccagcctgggcaacacagcaagattgtgtctctaaaaccaaaataaagaaaaaattgaaatgttcagagactcagaaagggaaaagtcatgaggcaagtgttcagataccaccttggggaaagtttgctgactctgtggaaagtgagcaggaaatgaagtagcgttaagggtagaatgtgttgtcccagggttgataagaaatgtggtggtggtcggcctggtgactcaggcctgtaatcccagcacgttgggaggccgaggcgggagaatctcttgatcccaggagttcgagatcaccctggccaacatggcgaaaccccgtctctactaaaaatagaaaaaaattagctgggcgtggtgatgcttgcctgtaatccttgttactccggagactgaagcatgagaattgcttgaacctaggaggcggaggctacagtgagccgagactgcaccactgcactccagcctgggtgacagaacagactctgtctcaaaaaaaaaaaaaaaagaaagaaagaaaaagaaaaagaaaaagagaaaaactgagcttggagaatggaactaatttttttttattatttatttttaatttttatttatttatttatttattttgagacggagtctcgctctgtcgcccaggctggagtgcagtgcggcatctcaggtcactgcaagctccgcctcctgggttcacgccattcacccgcttcagcctcccaagtagctgggactacgggtgcccgccaccacgcccggctaattttttgtattcttattcgagacggggtttcaccgtgttagccaggatggtctcgatctcctgacctcgtgatcctcccgcctcggcctcccaaagtgctgggattacagacgtgagccaccgcgcccggccgtggaactcgttttcgtacaatcacagagctacacacaaagaacaagtgatgtttcaaccccaagttaaaatgtacttacccactatgttatctaatcattttagaaaactcagtgatagatcagtcaggcattctggctcaccagtatttctgtgtctttgacccactttgaatcccaagtccaaagtggacaacataatcaggaagagaagttatcctaccaatgagtttccccgaggctctcttcatatctctgttcctcaggctgtagataaaggggttcataataggtgtgaccactgtgtacatcactgaagccaccgcagccctccttgaagagtcagaaacggcagagctaatgtacaccccccaacccgccctgtagaatcgggaaacaaatgggaggtgagactcacagctgaaaaaagctttattacttgctgacggcattctcaaaacagacaaggctatttgagaataagaaaacatgaccccagagagaagaatatcaccaaatatgcaagttgcaaaatagaccagaaagttatttttatttatttatttttattgtttttttttttttttttttgagtcggagtctccctctgtcacccaagctggagtgcagtggcatgatctcggctcactgcaacctccgcctcccaggttcaagtgattctcctgcctcagcctcctgagtagctgggactacaagcaagcgtcaccacacccggataatttttgtatttttagtagagacagtgtttcaccatgttgggcaggctggtcttgaactcctaacctcgtgatccacccgcctcggcctcccaaagtgctgggattacaggcatcagccaccgtgcctgactgcagtagccattattttattctgattttatgagatcagctcttttggattctacacatggttgagatcatgcagtatttgtctttctgtacctggcttatttcacttagcataatgttctccaggttcctccatgttgtggcgaatgacagaatttccttctttttaaagggtgcatagtactctatcatataccacattttctttttcttttccagacaaagtctcactctgttgcccaggctagagtgcagtggtgcgatctcggctcactgcaacctccgcctcctgggttcaagtgattctcctgcctcagcctcctgagtagctgggattacaggcatacgtcatcatgcctggctaatttttgtatttttagtggagacacggtttcaccatgttggccaggctagtcttgaactcctgacctcaagtaatctacctacctcaggctcccaaagtgctgggattacaggcgtgagccaccgtgcctgccataccacattttctttatccacttatatgttgatggacattcaggttgattacatttcctggctattgtgactaatactgcaatgaacatgagagtgcagatatctcttcagcatattgatttcaattcctttgaaattcaacagcacaaacataaatcaatataactatagatagtcaacctaaataacagaaagaggctatctaaaagaaaatgatgtttattgccaaagaaagcattgcaatagcgatacgcgtgccatcataaactatgtatgcattcaaggaggtaaaggaagacaaagttttttaatggaaaaatgaggaaggttacataattgttttgaaataattatccttcacagtaataactaataacaagggtgatgccagtctgaagctggacaggcagttgctgggcagatgtacttgcagaaatattttttgtgtaaggttgcaacagccttttgtgcaaggttgtggtttttgtcgtctcgtgatagtttttgtcgtctcgtgatagtttttgtagtcttgtgatagtttttgttattaggcatgcaagtgaaataaatctcttcatggccttccctagctttacttgtcaggatgtttttgtttttttcatttttgtttgtttgtttgtttttcatgagatggagtcttgctctgtcgcccaggctggaatgcagtggtgcgatcttggctcactgcaacctccgcctcccaggttcaagcgattctcatgcctcagcctcctgagtagctgggattacagatatgcgccacaacgtctggctaatttttgtatttttcatagagatggggtttcaccatgttggccaggctggtctcgaactcctgaccttgtgatccgcccacttcagcctatcaaagtgcagacttttttgatagccgctacacccagccttttttttttttaataagtgactccattttgattctgacaattttaacaatatatataccaagtacagtcagccttccatatctgccagtaccacattcatggactcaaccaactgtggatcaaaaatattaaaaatattaaagaaaattttaaaaatattaaataagaatattacaaaaatacaatattaagtaatacaactatttacataggattaacattatgctaggtaatataagtaatctagaaatgatttaaagtataggcgacctgggcacagtggctcacactgcttaatcccagcactttggaaggctgaggcagaaggattgtttgaggccaggagtttgaggctgcagtgagttataatcacaccactgtagttcaacctcggcaacagagcaaggctctctctaaaaaagaaattaatcatttaatattaaaattaaaaattaattacttgatttttaaattgtaaataaattacttaatttttaaattaaaaataaattagctagctgggcatggtggctcatgcctgtaatcccagcactttgggaggctgaggcgggcagattacctgaggtcaggagttcaaggcccgcctggccaacatggtgaaactctgtctctactaaaaatacaaaaatgagccaggcacagtagcaggcgcctgtaatcccagctattcaggaggctgaggcaggagaatcgcttgagccccagaggtggaggttgcagtaagccgaaattgagccactgcactctagactgggcgacagagcaagactctgtctcaataaataaataaataaataaataaataaataagtttttaaatttttaattaaatttaattttttttaaaaaaagacttagtattggatagaccagtagggtgactatagttcaaaataatccattgtatatttcaaaatacctagaagagaacaattggaatggttggagcataaagataagacaaatatttaaggtgatggatatctaaagtaacaaatccttgcagattatacaaatgtattacactatcacatgcatcctgaaacaatgtacatctcttatgcattgatacaaaaatttaaaaaaagccaggtgtggtggcatgcacctgcagtctcagctactcgtcaggctgagtccagaggatcgctttagcccaggaattcgaggcagcagtgagctgtgatcacaccactgcactccagcctgggcaacaaagtgagagactgtctcaaaaatcaattagtcagtcaatcaatccaaaaagaactcaagtccacgtggtccgattccaaaactatcaccctgaaccatctgatctctggtctcatgtattcaaagacattggtcaggtggggcacagtggctcatgcctgtaatcccagcactttgggaggctgagacgggcagatcacctgaggtcaggagttcgagaccatcctggccaatgtggtgaaaccccgtctctattaaaaatagaaaaattagctgggcttggtggcacgtgcctgtaatcccagctactccggaggctgaagcaggagaatcgcttgaacccaggaggcggaggttgcagtgagccaagattgcgtcactacactccagtctggtcaacagagcgagactccatctcaaaaaacaaacaaacaaacaaaaacaaaaacaaaaacagaaaaccccaaagacattagtcaggctttcaagacttctcattacttctttctccctgacatatcccagcagtgtaagcccaagaagctgagacatcaatggaaagatggtatcctagatattagtttcctcaaagccttcaacatgtccttgtttctcaggctgtaaatgagtgggttcagcatgggggtgaccacggtatacatcactgatgctattgcacccttcctggaggagtgggtagccccagaactaaggtacaccccaaaccctgttccataaaacaaggaaacaacgattaaatgtgacccgcagatggaaaaagctttatactttccaccagctgatggaattttcatgacagaggagacaattcgtgtgtaagagaaaatgatcccagagagaggaacaacacctaacaggctggtcaccaaatacaccaggatgttattgatgaggacatcagaacaggcgagcttgagaatatgagctagttcacagaaaaagtggggaatttccaggtctatgcagaaggtcagctgtagcaccatcaacgtgtgcagcagagcatccaggacactaacgatgaaggacagcagaagcagcagcccacagagtttggggttcatgatgacattgtacctcagtgggtgacagatggccacaaatcgatcataggccatcatgaccagaattccattttccaatccaacaaaaaccaggacaaagcagatttgggtgaggcagcctgtgtaattgatggattgagcctgtgcctggatgttcaccagcatcttgggcatcgtggtggaggtgaaacagatgtcgaccaaggacaggatagagaggaggaagtacatgggggtgtggaggtgggagtcagagttgacggccaggatgatgagcaggttccccagcattgtggccaggtacatggacaggaacagcatgaagaggatgggctgcagctccggatcccctgacaatcccaagagaaagaattctggagtgtctgagaagtttcctgctttcatgttgttgatgagtcttgatcttgtcaatattatcaaaaccaaaccagttataagttatagaccttttttccttccttccttccttctttctttctttcttccttccttccttcctttctttttctttctttctttctttctttctttctctctctccctctctctctttctctttctctctctttctttctttctctctctccctccgtctttctttctttctctttctttctttcttcttactttctttttctttccctccctccctctctccctcctctttctttttctctttctctttctttcttttctctttccttctttctttctttctcctttttctttctttcttcctttcctttctttctctttctttctctctctccctccctccttccctccctctctccctcctctttttctccttccttccttccctccttcccccctctctttctttctctctcttttccttccttccttcctttctctctctctctctctttctttccttccttccttccttcctcccttccttccctccttctttctttccttctttcttctttgcagggtctctctctctctgtcatccatgctggagtgcagtggcatgatcatagctcactgtagcctcatccccctgggctcaagcaatcctcctctctcagcctcccaaatagctgggatgacaggcatgaacccccatgcccagcctgttctttacttccttcctaggtaccctatcagtgtctttctcacccaccaatttccctttctcattacagtttgtgaaaataaaaattaagccctctttatctagcagcataagcccctcccactatttttatttgccttcatctgtctttcatttgtatcacagataatgttaataaagaaaattttaacagtaagccatgcatcagaccctctttccattatttttttcttttctttttttttttgagatggagtctcgctctgctacccaggctggagtgcagtggtgggatctcagctcactgcaacctcttcctccagggtttgagtgatcctcctgcctcagcctcccaagtagctggaactacaggtgtgtgccaacacacctggctgatttttatacttttaacagagatagggtttcaccatgttggccaggctggtcttgaactcctgacttgaagtgatccacccgcctcagcctcctaaagtgctgggattacaggcttgagccactgcacccactcttcctattattactggtgcagcccctggttcaggcaacccctgagccttggcactgattcctggaggagtcctgtgtgagtcagcgccaaacctttcctgttccttctggcttatccagattcttgagaaattgattctggggcccccaaagcaggaagtaaagaattgatgtatgccggcaatgtcaaaacatcagcctgctgttctcataaacccataagttaaggaaattctgtaatgatgactcaggagttggggcaaacatattatagaatcacagcatgtgaacagttgaatggtgcagtgagcccatctcagccctttgcttcacaaattgagttcctggccagacacagcggctcacacctataatcccagcactttgggaggctgaggcagaagggtcgcttgaggccaggagtttgagaccagcctgaacaaagtagcaagacccatctatagtaaacattttttaaaaattaaattaaattaaaaattagccaggcacggtggtacgtgtctgtagtcccagcaacttgggaggctgagttgggaggatcacttgaacccaggagttggaagctgcagtgagctttcatagggtcactgcatgccagcctgggcaacagagcaagactctgcctcttaaaacaaatacacaaacaagctgggcgcggcggctcaagcctgtaatcccagaactttggaaggctgaggcaggcggttcacgaggtcaggagatcaaaaccatcctggctaacatggtgaaaccccgtctctactaaaaatacaaaaaattagccggacgtggtggtgggtgcctgtagccccagctactcaggaggctgaggcaggagaatggcgtgaacccgggaggtggagcttgcagtgatccgagatcctgccactgcactccagcctgggcgacagagcgaaactctgtctcaaacaaacaaacaaaaaaccaaatacacaaacaaaaacaaaattcaggcccccaaccgggagctggcttttactggagaaagacaaatgattataaaagcttcaaccattggtgcataaaacttggactcagacagttgtcagttccgtcatgtatgcctcaattgtgacatggatccgtgacatgagaaggtccctgaacctctctgagcagactcaagtttctcacttctccgatgggaactggtataaaaatgtgcatggggtgttgcagggatgaaaaatgaatagatgttaggataggtgtatcctagcacagtgctcaggggtcctgcaataaccttttatttatttattttgagatggagtctcgctctgtggctcaggctggagtgcagtggcacgatcttggctcactgcaacctctgcctcccgggttcaagcgattctcctgcctcagcctcctgagtagctgggattataggtgtgcaccaccatgcccagctactttttgtatttttggtagagacgtgatttcaccatgttgaccaggctggtctcaaactcctgaccccaggtgatctgcccaccttggcctcccaaagttctgggattacaggcgtgagccaccacgcctggcctgcaatgacctttcctatcatttttgtttctagctgtggacaatgcttgatgcctcagggacatgggggtgagatggggtgcaaaaggaagaagcagggaagatatcccaagaataatgtcaggccgggtgcggtggctcacacctgtaatcccagcactttgggaggccgaggcgggcagatgacctgaggtcaggagtttgagaccagcctggctgacatggtgaaaccccgtctctactaaaaaaatttaaaaattagccaggtgtggtgatgcatgcctgtaatcccagctacttggagactaaggcaagaggattgcttgaacctgggaggtgcaggttgcagtgagctgagatcacgccacttcactccagcttgggtgatagagtgagactccatctcaaaaaaaaaaaaaaaaaaaaaaagaagaagaatgtcttagggctgagcaaagaaggcatgtgctcaaaatcccactgagggttctcctagtgtaataaggtacagaaaagaaagaactgggcttgacacagtggctcaagcctgtaatcccagcactttggaaggccgaggtgggaggatcacttgagcccaggagtttgagaccagcctgggttgtgtgtctgtactctatctagcctgggtgacagagcaagatgctgtctcagagaaaagaaaaagaaaaaagaaaaagccaggcgcagtggctcgcgcctgtaatcctagcattttgggaggtagaggcaggcagatcacttcagcccaggagttagagaccagcctgggcaacatggtgaaaccccatctctacaaaaaatacaaaaactagtcaggcatggtggcatgcacctatagtcctagctactcaggaggctgaggtaggaggatcacctgagctcaggaggtcgaggttgttgtgagccgtgattgagccactgtactccagtctgggtgacagagtgagatcctgtctcaaaataaagtaagaaagaaagaagctaaacaaacatcagtatggggatagatacacaaattatggcactattattacatgtaataatagtgttaaactaagcatagtgaatgcccaccaatttcagagagtggtggtccccaggaagggaaggagaggaataaaaacaaatcaagaggacttcatgtttaagtgttatactttattgttattattattatatttagtattttaaatctatttttaaaattaaaaaaaattttttttttttgcagagatgagctcttgctatgttgcccaggctatgttgctatgttgcccatgcctgtaagcccaaagtgctaggattacaggcatgaaccaccacatctggcctgttttggggttttaaaagagaaaccgaaagactggaaatgtaagtgagtgggtctcaacttcctcttctggagtttctcactgtcaagagatggggacaagagtcaagttatttaagggtgaaatctggcaacagacatggtgaagattgaaaagccagacacatctcatcaaagccccatctgcagtcaaaagaatgaggaaaaccatggggccaggcatggtggctcatgtctgtaattccagcactttgggaggccaaagtgggcggatcacgaggtcaagagatcaagaccatcctggccaacttggtgaaaccccatctctactaaaaatacaaaagttagccaggcatggtggtgggcgcctgtaatcccagctactcaaaaggctgaggcaggagaatcgctggaacccaggaggcggaggttgcagtgaactgagatggagccactgcactccagcctggtgacagagcgagactccttctcaaaaaataaaaaaaagaatgtggaaaaccagagaactgtagattccttttgtttatttgtttgttttatgagacagagtcttgctctgtcaccaggctggaatgcagtggtgccatctcagctcactgcaacctctgcctcccgggttcaagcgattctcctgcctcagcctcctgagtagctgggattacaggtgcatgccaccatgcccggctaaatttttgtatttttagtagagatggggtttcaccatgttggccaggctggtcttgaactcctgacctcaggtgattgatccgccttggttcccaaagtgctgggactacatgcgtgagccaccgcacttggccagattcctttttgaagggactaattcatacttaggtagggaaggagtccctaggatttagaagacagaatgagagctgaaaataatgaaatctgattataaattgtaagaaaacaggggaagtaaatatatcatgaaaagggtcaccgattagtttggaatctcacttataacaattctgctgaattgtctcttactttatggttgtcctccagataagatgggagaaaaaataaaataaaaaacttgttcagtttctcacagcatttattgggagcatttcagattaccttgaaggcatcagtaaggaattctccattttttttcttggagaattgtaagatgaaatggaagatctatccccaagaagggcagatgaaccaagtaaggcaacccactcttgggcaagagggatcatctctggagcaagactcaggtgtgatgtttcctaacatgagcggggctgttgagtggagtggtcaccggtagattatttgcagtctctgtggcccctaggagctcaattttcaaagctgctcattagctagatgtgtacagtactgtcatttcttcccctaaggcagctcaaatccttaatgagcacaggtcagacgtgagcacaaagggggaattcctggatggttgactttctgaccccaagggacaagctgtatgtcattctcttccaaccacatttcctcttatcccgagggtatctcattcttggatcctaggatcggacccctagggagctggtggaatcctccttagacagaatcccagctttctctgagtcagaaattgcttttttttttttttttttttttcaaaccaagtctcactctgcgccctggctggagtgcagtggcgtgatctcagctcactgcaacctccgcctcccaggttcaagcgattctcctgcctcagcctcctgagtagagtagctaggattacaggcacacacgacacctggcaaatttttatattttcagtagagacgaggtttcaccatgttggccatgctggtctcaaactcctgacttcaagtgatccacacacctcggcctcccaaagtgctggaactataggcacgagccaccgcacctggcatcaggtatttctttataccaacacaataatggcctagtacagtaagtttttggaaaagaaatggtgacataatgttgacaaaatgcagataaagcccaaacccagtctgaaacaaatgaagaacaaaacctaaagttgatagggtatgaaatggtgcagtgatggtgacaaaaaatggggcctgtgtgggtttctctttaaatattgaccctaaacttgggaagacaaggggaaaaatgtctgcattcataatcaaaggaatgatacttccatcgtttgatattttatgtagtttactaaggaatgattctattacgattggaaattacattgacaggcaaaagctattatgtatgaaaaatgagaaagaattagacaatggcttccaacgtaaatattaaggagaacaggtctttaagaagacagttctttcaaaaaaaaggccaagcgtggtggctcacgcctgtaatcccagcactttgggaggccgaagaggcagatcatttgaggtcaggagtttgagaccagcctggccaacatggtgaaaccccgtctctactaaaaatacaaaaattagccaggtgtggtggtgggtgcctgtaatcccagctacttggggggctgaggcaggagaatcacttgaacctgggaggtggaggttacagtgaacagagatcgtgccaccacactcaagcctgggtgtcagaaagaagacaggtctttaagatcctaagtaggaaatgataggtaaaaagtgaaagatagggaaagctgaagctatatgaggaaactcatagtaaatgttctctgctttccccttaagcttttcttttttcttttctattttttttttagagacagggtcttgctctgtcgtccaggcaagagtacagcgatgccatcatagctcactgcagccttgaattcctggactcaaggaatcctcctgcctcagccgcccaattgactgggactacagatatgcaccaccacatccagctatttttgtgtgtgtgcaaaaatgggaactcactatgttgcccaggctggtctcaaacacttgatctttccacctcaggatcctaagtagctgggatagccaccgtttcgccaccatgcccagcctaaaatcaagacatatgaacaagagaattcacaagttttctgtttctctgttgcaccaaaggcagttccatcatgacccatccagtatcttctccttctggattcaaggtgtttttgatcttgggtcttgattttgtgtggcatgtacaacctcaaagcaatatggtgaactttttttacctgctctatccctaatgtatatccacattattgaactgcattgctcaccatttatcaaaactcccatgctgccctgacacatctctggcttctcatctgaattggcatcaacacagagacctaatgcattcaagtcattggcacctgactcctgttctttaaacacccagctatgccatgattcaggataatttattttcttttatttttgagacagagttttgctccttcacccaggctggagtgcagtagtgcaatctcagctcactgcaacatctacctcctgggttcaagcagttctcctgcctcagcctccctgagtagctgggattacaggtgtgtgccaccatgcctggctaatttttatgttttagtagagacggggtttcaccatgttagccaggctgaacttgaactcctgacctcaagtgatctgtctgcctccctaaatgctgggattacaggcatgagccactgcacccggccccaacttcttcaccctttcggccttactgcatctcctctcctaatgcatagaggcctccaagccatctattcttcaaccatgttgctatttatttatttttatttattttgagatggaatcttgctctgtagccctggctggagtgcaatggcgtgatctcagctcactgcaaccctcacctcccgggttcaagcaattctcctgcctcagcctccctgagtagctggtattacaggtgcccgccaccatgcccagctaatttttgtattctatttatttattttgaaatggagttttgctcttgttgcccaggctggagtgcaatggcaagatctcggctcactgcaacctctgcttccaggttcaagccattctcctgcttcagcctcctgagtagctgcgattacaggcatgtgccaccatgcccaggtattttgtatttttagtagagacggggtttctccttgttggtcaggctggtcttgaactcccaacctcaggtgatccacccaccttggcctcccaatgttatgggattacagccgtgagccaccgcgcctggccaacctcatttctttaactaggtaactgagattcaatcatatattttccaaaacctcaaattccctactctctgtcctatcataatacctgccctggaaaacgctaaccatctgtctctcctgcctacataattctgccgccacgcggtgatatgggaagcgctaaaaaatttgagatcacctactctaaaggggccttcgacacttcaggaaatttccagtgggcaaagatcttttcatgatttctgcaggattttgaattcacaccatctcaacttccctcttttttttttttttttttttttttttttgagacagagtcttgctctgttcccaggctagcgttcagtggcaccatctcggctcactgcaacctccaactccctggttcaagctattctcctgcctcagcctcccgagtagctgggattacaggcacgcgccaccacgctcagctaatttttgtatttttttagtacagacgaggtttcaccatgttggccaggatggtcttgatttcctgatctcgtgatccgcccgccttggcctcccaaagtgctgggattacaggcatgagccactgcgcccggccacaacttccctgtttaataacaaatgattttacaacttactgcagagagaaatagtaacgaccatgagaaagatttctcaccttctttattttttctcttatcctagattcgagagatttctcaccttcttgacactagtgcgaaagtagtccagtaacaacatcaccagttctttcttctttcactctgcaagcaatgagatgtctgccttcttatctacagccagtatctcctgcttttttttttttttttctttgatacagagtctctgtcacccaggctggagtgcagtggcacgatctccgctcactgcaacctctacctcttgggtccaagagattctccggcctcagcctcctgagtagctgggactacaggcacgcaccaccacgcccggctaatttttgtatttttagtagagacggggtttcaccatgttggccaggctgatctcgaactcctgacctcatggtccacccgccccggccaaagtgctgggattacaggcgtgagccaccgcgctcggccatctcctacttttctatgcaagggtttctcatcattggcacgactgacattcaggacctggtatttctgttagagggagtagggcattctatactctaaccactagatgtcagtagtatcccgggtagtggtaaaaccaaaggcgtctccacaggtggcacaattgtccttgttaagaatcaaaacgtgcctcactcataggtgggaattgaacaatgagatcacatggacacaggaaggacatcacactctggggactgttgtagggtggggggaggggggagggatagcattgggagatatatctaatgctagatgacaagttagtgggtgcagcacaccagcatggcacatgtatacgtatgtaactaacctgcacaatgtgcacatgtaccctaaaacttaaagtataataataaaaaaagaaaaaaaaacgtgcctggcgccgtggctcacgcctgtaatcccaacactttgggaggccaaggcgggtggatcacttgaggtcaggagttcgagaccagcctgaccaacatggtgaaatcctgtctctactaaaaatacaaaattagccagccatgatggctaattacaggcttcatacctgtaatcccagctactcgggaggctgaggcaggagaattgtttgaagccgggaggcggaggttgcagtgagccgagatcgcaccattgcactccagcctgggcgacaaaagtgaaactaagtctcaaaaaaaaagggacccagcgtggtggctcacgcttgcaatcccagcattttgggaggatgaggcaggtggattgtttgagcccaggagttcaagaccagcctgggcaaacatagggaaaccctgtctctatgaaaaatacaaaaattagacaggcgctgtggcatgcacctgtagtcccagatacttggggggctgaggcaggaggatcacttgagcccgggagatcgaggctgcagtgagccgtgcactgcagcctgggtgacagagcaagacttgtctcaagaaaaaaaaaaaaaaaaaaggcatgatactggcataaaaatagaaactaaaggaacagaacagagagcctgggaataaatccaaacatatatgatgaactaattttcaataagggcaccaagaggacaaaatgggaaaaggatagcctcttccgtaaatgctgccaggaaaactagatttccacatgcaaaagaaggaaatttgacccttatcttacgccatacacaaaaatcaactcaaaatggataaaagaccaaatatatatatatatatttttttgatattacaccaaaagatcagactacaaaagcaaaaattagtagacaaatgggactacatcaaattaaaaagcttctacatagcaaaggaaacaatcaacagaatgaatcggcgatccacggactgggaaaaaatatttgcaaaccacatatctgataaggggttaatatccaaaatttataaagaactcttataaatcaatagcagaaaaacaaataacctgattttaaaatgggcaaagggtctgaacagacgtttttccaaagaaggcataaaaaaggccagcaggtatatgagaaggtgctctacatcactaatcatcagggaaatgcaaattaaaaccactgtgagatatcacctcacatccttaaggagaactatcatcaaaaagataggagaggccgggcgcggtggttcaagccggtaatcccagcactttgggaagccgtggcgggcggatcacctgaggtcgggagttcgagaccagcctgaccaacatggagaaagcccgtctctactaaaaagacaaaattagttgggcgtggtggtgcatgcctgtaagcccagctactcgggaggccgaggcaggagaatcgcttgatcccgggaggcggaggttgcggtagctgagatctcaccattgccccccagcctgggaaacaagaacgaaactccattgcaaaaagaaaaaaaaaaaggaaaaaaaagatgagagatgaatgttggcgagggcatcaagcaaagtgaaccctagtacattgttggtgggaatgcagactggtacaacctttgtggaaaacagtattcaggctcttaaagaaatctacaacagaactactatatgacccagcaattcctcttttgaatatatgcctaaaagagatgaaataatcacctcataacgatgtctgcactttcattttcattgtagcattatttacaatatccaagttacggaaacaacctgaatgtccattgatgctcacatgaatacgaaatacaaaatagcagctatgtagtctgaataatattctatctcttttgtatttatatatgatgtcaacattaatatcatataatattgatatatatttcatattatattaaatattaatataatatgttgtatataaatatatacctattacataatagatattcccattatgttatatatcatgtaatatattatatgtaatatatgtatataatatactatatgaaatacatattatatattatatgtattattatatgtatatatgctatatattatggtgtatatattatgtattatgaaatatatattacgttatgtaatatagattatatattatatatgaatatcttatatccatatatattccatacatacattttatatgtgtgtgtatatatatatatacgcaccatggtccatcccctcaataatatattttccaaaacctcaaatttccttctctctgtcttttataatacctgccctggataatactaaccatctgtctctcctgcctatataattctgcccctactggttacatgggaagccttggtttcctaaagtgttgagattacaggtgtgagccactgtacccagcctgattctggaattttgtatatgcagactcctcctgctaaaataatatatattatatataatatatattccataatatatataacatacatacatatattattttagcatatattatataatatacggtaataatacacataatacataattataataaatatgatataatatatattccattgtataaaacatataatatatataacggaatattattcaaccttgaaatagaaggaggtcctgacatttatcacaagatgggtggacctggaggacattacgctaagtgaaataagccagacacaaaaagaaaaatattgcatgacgtcacttacatgaggaactttttttaatcaagagagacagctcaaatacacagaaataaagaatgaggcagttggggaagaaaatgggaagatgtgggtcaaaaaatacaaaatagcagatatgcaggatgaacaccacacaggtgatggtgattttacgcccttcccaaggtgtcattcagaggcacgtggtctccatctgaccctcactggtgatattgatttgatcacctggtccagatgttgtccaatttcttcgctgtacaatttctattactttttctccattccaacatacgagcagtttatagagaggcatttaaggcaattcaaatattctgctcgtcatgcaaatgtcccccagttgtgtcatgtagatgacaattcttgcctgattcaacctttaccactacgatggctacaaaatgctgtgggttgtggttgaaaatttgagtcttgagtagaaattggagaaatatgctggaccgtcagattccaccggggcacggccgccatgccaatccaaacttcaaaactacaattcccagcatcctctccgccccgcttccgtattagacgccgccaatgaagtcccgcgagaattggaaggcggcagtgaagcggaagccattactctctggagtcgattgccccgagacacatgggccaaggaggggtcagcggcgaattctttcggcctgttggggacccctcgtgtccccacgccagactggacctcccgtatgaacttctcttcgcatcggcggcggcttccgtcacctccgctcccccgatcctattcccagtcgtgtaagccctgctttccttaacccttctccccctcagttccaggggtcacgggaggcctatctggcggtgaggactaagagggtacgagggtcgggggctaaagagctaggcatccagacgaggggtgcgtttagatctcgcgatcagcgatatgaaaagctggggacgcgaaggataaaattggaccattgcagctagtgatgagagaagcattggtcacctgatcctgaaaagccctaagtctctggtgggggcggaaaagcccggctgaagtgaattcaagagtttgggggcagttcaggagattggggggcgtcaggatttggacatcgcgaggagaaatcaccttctttctgcgctgtagtcaattttatctcgtgaatgtcagcacattggtgttcttattagcacttaccttgagtaccttttatatttttaatttaagaccttctggttgcacttttttatttattttaattttagtggactcttgtaaatagcctatatgtatatttactattcagttcaacattttgttaattaacttgagttagtccagttatacttatcgtgattattaatattttccattgaattttaccgtcttattttgtggtgtgtcctttcctatgcacatattttaacactggaaaataggacatacatgcaaaaaaagtatgattacacacacacgcagacttacacacacttaaaaggacaacagtaaagcgaatttacaaaccaggccaagaaagagattattaaatctcagaaagctgtgtgcctcttctaaactgcatcctcctctcccaccaatactgtctccgtggatttgactgcgtatacatcttttccagaaaatatatttcctaaattttggtaattatttgtgaatgaactcaggcgcttcagtatttttggaaacaatctttttctgtattgattcaagcacacctttgtaatttagagatttctaaatatcttgtagatgaagtacttacacctagccattctttttcaggaatgtcatggcttaaattctagtcagttcaccaaattccacatactggacttttgttttcaagttgtggtgaatctatatttgaactttgggaatattgtcgtttttatgccattgagttgcagttaattgatttacatcatttatttacatcttctttaatgcctttcaataaagtgttttttgttgttgttgttgttttttcctttttgagatggagtctcacccttgtagcccagactggagtgcaatgacaatctcggctcactgcaacctctgtctccctggttcaagcggttctcctgcctcagcctcccgagtagctgggaatacaggcacccaccaccacacccagctaaattttgtatttttagtggagatggggtttcaacatgttggccaggctggtctcgatctcctgacctcaggtgatccaccggccttggcctcccaaagtgctgggattgcaggagagagccacgatgtccggctcagtaaagttttataagtacctgcaaaaaggatttaggttgtttttgttatatttattcttgggaactttgttttttggtgctcagaaaagtctaacttttgtgtagtttgttggatgttcttcgtagacaaggaaaatgtgtacaattcaaaaggaaaatacaaatatttattttatacagacgataaattgtcttttttgtttgtttgtttgtttgtttgttttttgtgctggactgggtggggacttcccttgtcattgactggagtttggatggcacactctaggcaagcctgtttgttttctgatcttaaagggaattgtcatttgtgtctgccgaaggcttttctgtcgaatagtttttattaggtcaaggaagctcccctcttttcctacttgagtttttcttgtgaattgctgcaggcttttaacaagtgattttttttttttttttgccattatgtatctgtttattgatacattttgtatctgtttgatacaaaatctatattgatagttttgtatctgtttattgatacatttctagtaccttaaattatggcactcagtactgctgtgtaacaaattaatgagtgaataatataattttttttctatcctgtagtgtggcaaattaaaccaattgattttctcttgttacattgaatttgtattggtaaataatttggaaaggacatgttactatttgttacttttggcttcggtttgctaatactttgtttggtgtttttggatctatgcttgagtgaaatgttccttttctgtttcagatttatgccagcctcataaaatgggatgagaagtgttctgttttctaaactctggaatgttttgcataagaatagaatattttgttccttagaacgggagtggtacctggaaaaaccatttgggtctggagttttctttgtggaaagttttaaagctattgtttctgttcttttaaggtttgtggggcattcaggttttctgtgttgttatgatgagtaaaatttctttaggaatttatttattccatctgaggtttaaatcgtatagtcagggttgttcataacatactcaaatttttaatgcttgctgcatttgtaatgttatccacttttttatttataataattatatgttgctttttacaaaaataaattccatcagaatgttgtcagttttcttcttaaagaacttctggcttgattgaaccactttatgatatatatgttttctattttataactttctgattgttatcattttcttcctttttgggatgtttctttccagtttcttatgttgaatgcctgtcacatcccaaagaattgcagtatcatactttattgtattttaattataaatatcaaatatcatggcttctttggcatgcagatttagaatttttttcttttaattttcatttctgtgactttttttctggttatcttttggtcattgtttgccaactgcattgctctgtggtcaagcattttctgagacaaacatggccccatgagtgctgtctcatcatgttcaatctgcacatagttattgaactgcctgcttaaactggatttgtgagagctctggtggtggcttcatccatttctccttagaattctgtccccccttttttttttttaatttttgtgttttccttttttttgaggctgtgttttatacacacaggcacacacacacacctctttttggatttataactttttattatgtaatacttcatttttctctatgagcctttttgccttaatctattctgtctgatactaacattcaaaccagctttctttttttttttttttacttgccttatatatccttttatttccattcttattgtactcttttttctttctttctttctttctttctttcttttttttgagacggagtttcactctttttgcccaggctggagtgcaatggcgcgatcttggctcactgcaacctccacctcctggaatcaagtgattctcctgtctcagcctcccaagtagctggaagtacaggcgcatggcaccacacccagctaatttttttattttcagtagagatggggtttcatcatattggtcaggctggtctcgaactcccaacctcaggtgatccacctgccttggcctcccaaagcattgggattacaggcatgagccaccgcgcccggctcttattgtattcttatattttagatatctcttgtacgtagcatataattggattaatctattctgtgaatattagtattttagttaaagcatttattctgttagcatcttctgtattaatatatttgaatgttacatttgtcttctgttttttctctagcttcttttgtgtatttttgtcattctccttttttattttctgtacattttgaatttatttactctattatttcagtggttgttctaaataattcttacccatgctcattcactaaatctagatttgcatatgttactctcctgatttacatggttttcttatgcattttcattctttctttattgatatatcatagttgcacatattgagttctttttttaaacctcagaagaaattattattgctattgcataccatcatttcttgtttcattatactcacatgtttatcactttgagcactttacttggttcttacactttttggtgtaattcttccactgtttgctttggttctttaattacttctttctccctgaggtatgtctttgatgatgtctcttttctgtgggttgcaagcccacaggaactttgttttttggtgctcagaaaacacctctttctctctttctcagtggacatttttggtggtaatagaattttatatttcagaactatgaagatgttccattatcttctggcttccactgttaatgatgagaagtcagctgtcagtctaatgtttgtttgtttgttttctgagacagagtctcactcttgttgcccaggctggagtgcaatggcgtaatctcgtctcactgcaacttctgcctcctgggttccagcaattctcctgcctcagcctactgagtcgctgggattacaggcatgggccatgacacccagctaatttttgtatttttagtaaagacaaggtttcaccatgttggccaggcagcggttttaggagcctagaaatgtgagtttttcgttttgttttgttttgagacagggtcttggtatgttgcccaggctggtctcgaactcctgcgtgcaagtgatccacctgccttggcctcccagcatgctgggattacaggtgtgggccaccatgcccaggcttactttgtttcttaatggagagatatttacggtgtgttttaacaagacctccaggtgactcccatgtaacttaaagtttgagaactattgcttaaaaggtaacctgtctttttctcctctggctgctgttcagatattctttttaccgttggtattatctggttcattgtgcttaagattttatctctcttcaatctgtttatattttccttcaaaatgaaaaatctacagccactatattttgcagtgattgcctaggctccttctctgtctctcatcagtaactccagttagaaatggttcaattccttatcttctgcccccacgtggttcttagctgtatttatgttcctcaactctttttctgtgcttcccttgcatttattgctacaactggctttgaaacttcagccttcataaaaatttcatgtagagtttattaaaatactgattcatcagcccaccccaaagagaattgaactgagatatgatctgggtgtcagagttacttaaagtgttccaggggacgcttatgcagcagactatatttaagaaacaaattattattattattattattattggctgtgtataatctaaaagctatttacttagggcttttgttgtgggtttccattttgctttttttttagcaattgtaattgccctttagaaatcataaatttttaattttctgaatgttaatttcttgccagcacatgaatttgaaacctatcatctgtctgtactttgtgttgcatttgaaatagttatgcatggaaggtttaattggggcacctaggttgcttgttggaaacagaattcctaccctgctccccaccccctgggacatctcatctagctggttgaaaggagggtatattgatttactaatgtaatgcatttctggaccaagaaaatggcatatgatgttctcacaacctttgttgccttctctgtctctcgctatatatatattgtatatattatttatatactttttttcttttttttttttttgaggcagtgtctcatttctgtcacccaggctggaagtgcagtggcatgatcttggcttactgcaacctccgcctctcaggttcaagcaatcttcccacctcagcctcccaagtaactgggactacaggcatgtgccaccatgcctggctaatttttttgtatttttagtagaaacggggtttcaccatgttggccaggccagtcttgaactcctgacttcaaatgatctgcccgcctcagcctcccaaagtgctgagattacaggcatgagccaccatgctgggcctatatttacgtgaataacagtggtagaaatggttctagcaagggcagaaataccagtcagtaaaagtaacaaaataattattctctctacagtatttacatctgcaaattctgaatatcctgggatactgtgattaagttgaatatggggataaaatcaaatattgggagaattatggtcctgagaaagctcataatggaacagttttgggcaacatttgttttggaccacaaacttgatggaggaggcagatcttctaaaactgaggagcagggctggagcaagggtgaggtttgtgagtgcagagccagggagccactcgctctgagccaaccttgtgcttgtctgacaccagaagtgcttccttaaataccacactcttgtctagcagccttggttgcctcatcccagtcctggccctggtgaggagaaaaacagatcccaatgagaatagagtaagatgtgtagaaatagaaaaatagaactgctttcaccatgctgtaaagaaaattaaaagagaaattaagcaaccccaacagctctgaaaaattaacctgtccgttctaactcatccatggtgacagcattccaatgacactggtttttttttttttttttttttttttttgagatggagtctcgctctgtcgcccaggctggagtgcagtggcacagtctcagctcactgcaagctctgcctcctgggtttcacaccattctcctgcctcagcctcctgagtagctgggactacaggcgcccgccaccgcgcccggctaattttttgtatttttagtagagatggggtttcaccattcacaggatggtctcaatctcctgacctcatgatccgcctgcctcagcctcccaaagtgctgggattacaggcgtgagccaccacgcccggctgatcctggttttgtttcatgtatcatgtagaaacggggcagaacgtctctgagttcatagatcctacagctgttctagacaccctgctccacatcctgctggggtcgcttagatgctgaaatcttcctgctttatttgtattcatggccaccagttctttgagactctctgatacagtttggatgtgtatccgccccctccccccctccaaatctcatatggaaatgtaattcccaatattggaggtggggcctggtggggggcgattggatcaggggggcagatttctcatgaatggcttagcaccatcccccttggcactgtcctcgtgatggcgggtgagttctcctgagatccggtcatttacacgtgtgtggcacctcctcccaaccctgctgtcttgctcctgcttcaccatatgctttgcctgcttcccttttgccttctgctatgattggaagcttcctgaggcctccccagaagcagatagcactgtgcttcctgtagagcctacagaactgtgagccaattaaacctcttttcttataaattacccagtctcaggtatttctttatagcagtgcgagaatggactaatacaccatcacccagcactgacaacccctgaaagtgatagaatcactcaggtgagaacttggccagaagctccactctgagctctggtttgcatcgttgcaaaacatcgacaaggttccacagactgaattgatgtgggtgcgctctctaagctccagccctctggacactttgtccttcatggagggtggtggtggatgttggccccagggtgttgggctaagccatagggctgtgtcctagtacctggattactgtttaatttcacaggaccttctgaggagatcccagaccccctacattccataggcccctcctttatggtctcccaaggtctgggtggctgtctcagtatgaaggcaaatgtagatcagcttgctcatcatccattcattctttcattccctacttattgtcttatttatatcaggcactggaatggtgaatgaaatatcatcaaagtaaaaagtctctactcacctggaatgtattttctagttgggcatacaggaaatcaaaacaagtaaactacatagtgtgcatggaggagacagcagagagataataatgcttacccggtgttctgtgtcctgtcctacatttcccaggatccttggagctggcaggggcatgtgactagttctggccaatgggctgcaagtgcttcagggtcaaaatatagacgacagaatgcatagttgtccagcttcctgctcatcatctatgaccaacatggccaagggtatcagttggttcagagacaagtggcatccttgaacaacaggaaaacttttgacatcagcctgggttgaacaagtgacatgagcaaggcgtaaactttccattttattgagtcattgagatttgggtttgtctgtttttgcagtaaaaaatagagcctaatcttacacagaacattacttggaaattagtgctttagggaaaaagaaaaggagtggagaattgggattgaaagaagcaggggtttgcattttaaaaagtggccaaggcgggtggatcagctgaggtcaggagctcaggaccagcctggccaacatggtgaaaccctgtctctactaaaagtacaaaaattagccggacacagtggcacacctatagtcccagctacttgggagcctgaggcgggagaatcacttgaacccgggaggcgcaggttgcagtgagctgagatcacactactgcactccagcctgggtgacagagcgagactccatctcaaaagaaaagaaaagagtggccagtgaatgccagatcaggacaggtaaagttgaataaagatctgaaggatgagagggggccaggcacactgagaatgtgggggaaacatttcaagcagaggagcagcaggtgcacagaccctgaggtgggagcatggctggcggggcctgatgcacagcagtgaggcttctgtggcttgggtgagggaccagtggcagagcgagttgtgggtgaggcggcagggacctgggcccttggtctgagtgagatgggacaccatcagaggatcttgaacagaggagcggtgtgatcttcattttacccataaagttacggctgtcatggaagctaagggaagtcagggacagcagctgggagaccagttaggaagcagttggaatgttctagaagagaagcgatgccttatgccaaggcagtagcagtgtaggtggtgagaagcaaccagatttttgtattaagttttaaagttaaggctggcaggatttgctggtgatgcaggtgtggtttatggaaaagaaagaggagagttgaaggtgatgacgagcaaggcttttgacttgagcccctgggaggctggagctgccatcaacgtggggaggctggtggcagcacagttgtaggtgtttaatgtgggatcctgttggctgttgcagtagggatactaagtagccacctggctgccactcactctgagtcattctgggtggggcaggtgccagggagcggagagtggcacccactataaatgaacaattctgttaagtaattgtgaaatcgtcagtggtcattttattttaatgataatggcattttagagtgaatgtttgtttactgagcctatagagttccatacataacccagtgttaaagtcttcagtttccagatgagaaaactgagttttgatgaactgactcttgggaggggaatgagcagaactgtgggcttgcattaaaggggagtctactgaggcctcagggacagggagaccttcacagaagtgcaatcagaacctgggtgtcagcacctccaaatggtgggggtgtttcacaatgtggacctgtgggagatgggggagaggggcccaggggaaccctgacctttaggggctgggcagaggagggatctcaagccagagtcttcaaaagagcaaccagagatgtgagcacagactgggatgagtgggctatggctgcaagagcagtggcattcccaggaagagggagatagattcatagtgagcaagatgatgtgtcaggaggtcaggcaaaggaagggtcaagatgtagtgtcaaggagttcccacataggggacagtacaggtgacataggtcactttgagaggcaacaagatgtggctccgcagtcacgtcagctgggctcacaacttccacctatgaccttgaccaagtgtctcggacccttggtgccttattctctgggtacttgagaataattccgggaggttgtgaggattaaataggagtggccctggaaagactcaggagaatgtctcataccttgtaaacactacacatgtcgttatttgtagaattggcattaatgttggtggggaaaggtggaatgggacctgcagaagcttgttagttgagcatgaatgaatgaatggtaggtgaggatggagatactgtgcctcaggaactgagcctctgtcaccctctctccccttcctcagcagtgacttaatgtcagaacccaaaggcacaatgactagaaaagggctttgtaaaaagaatgaaagcgtcatgcatctttgagttggcccaagatcaaatttggtgttgaataatgaatccccaaggcagagtttatacgttaaaacacacttcctatattattgttttgaaatgtttctgaatatctaaaacaattccaatagcagaaatactaattgatgttgaaaaagattgttataaccctggtaatgtttaaaagtggtaatattgattattgatctgagtcagatgttaaagtagcagcgtcacggttcttacatcagtgctgtcatgagagtcgcggtggaagccagagagaggaggcatgttcatacaaagcaaattaaatcccctcccgaggtgtgggccaccatacctcaccaatgtattgtggttttgatgttatttccttaatgactgatgttgttaatcatcttttcatgtgtttacagttcatttctgtaaatttggagaaatgtctgttctgttcaagtctcctgcccacttttttactgggttgtctttgttgttgagtttataatgatattaaatccctatcacatacatgatttgcaaatattttccaccattctgtgtctcattcactttcttgataatgtccttgatgttaattctaaatgtttggtagggttcaccagtgaagccccttggtcctggactttttttttttttttttgagacggagtcttgctctgtcgcccaggctggagtgcagtggcgcaatctcggctcactgcaagctccgcctcccaggttcacaccattctcctgcctcagcctcccgagtagctgggactacaggcactcatcaccacgcctggctaattttttgtatttttagtagagatggggttttaccgtgttagccaggatggtctcgatctcctgacctcctgatccacccgcctcggcctcccaaaatgctgggattacaggcgtgagccaccgtgcccagctggtcctggactttttatttaatggcttttgatgactgcctcagtctcttgttataggtctctcaattttctttttcttctagagcctgtttgggtatgtttcaaggaatttgatacatctagagcattgatccccaagccctgggccacagacaggtaccggtccctggccttttaggaacaaggccctgccgcaggaggtgagcggagggcaagtgagtgaagcttcatctgtatttacagcggctccccatcactcacattacccctgaactccacctcctgtcagatcatcagcagcattagattctcataggggcgcagaccctattgtgcactgcacatgcaagggatctagattgcacactccttatgaaaatctaatgcctgatgatctgtcagtgtctcccatcacctccagatgggaccatctagtttcaggaaaacactctcagggcttccactaattctatattatggtgagttgtataattattttaccatatattacaatgtaataataatagaaataaagtgcacaataaatgtaatgcactcaagtcatcccaaaaccatcccccctcacctcaccatccatggaaaaattgtcttccatgacaccagtctctgatgccaaattgggtggggactgctagtgtagatgatctaatgtgttggtgcataattgttcatggcattctcttacagccctttgaatttccgtaaggtcggtagtaatgtcccacttccactgatgattttagttacttgcatctttttttgttagtaattctagctgtagttttgtcacctttgttgatctttttgaaagaaccaacttttgttttcattaattctcctattctctatttcatttgtctctgctttaatctttatttcttcacttttgctttccctaggtttagtgtgtcaaggtagttgtttttgtttgtttgtttgtttgtttgtttgtttgagactgagtctcgctctctcacccaggctagagtgtgatggcacgatctcagcttacctcaacctccgcctcccgggttcaagcgattctcctgcctcagcctcccgagtagctgggattacaggcatgcaccaccatgcccagctaattctttgtatttttagtagagacggggtttctccatgttggtcaggctggtctcgaactctcgacctcaggtgatccacccaccttggtctcccaaagtgctgggattacaggtgggagccactgcacctggctggaactggtttttgtatgagatgtcttactggtggcttttcctaggcaaagggaataagatctcgagttcctactggaacctaagtgttagagatggggattcaggttaaatgagtggatgtgattacctgggcaaagcatgaggcatgcgaaggaatgggtaaagaatggctcttgagcagaatcagcctttagtggtgaaagaggacctctggatggtccagatgatccagagaagcagggaaagaaccaggagacagttgtagaggagccgagaatagagaatgattctcaaagaaaatagacaccacattttcgtgagactctaagactgaagtgcatttactggattcactgacacgggagtaaattgtattttctgtgaggatggggatgatggtagtggatgctgggtgtactgaattgggagatggtgaatgtagactgctcctaagtttttgctcggaagggggcactaaggggagccagggcaggcattggtttcaagatgggatagacctgagcatgtgtccatgcataggaaattgtctagcagggcgagaaatgaggctgaaagtaaaggagagccaggtagtgcgagggtccagagacggggatgggcctggagcagatttgaaaggattgccttgagaagggagggcagacatctctttgtcatagaaggaaaggaggaggtcatagatcagttgtgagaagactgtttaaataactagaagcaagaaggtaagaaagcctcattttttttctttcttttaagcagggtttaatatatgttcaagaaaatgcataggtcttacttaggtgatcagtttgaatttttgacaattgtgtacactgtacatctgaaaataggtaagtttctatcatcctagaaagttccctttgcttctttcagtctatccctgtcttatcctccattgaagaaacccccttttttttttcaattctatcaacttaattacgttttgcctattcatggacattatattgttggaatcagagcgtttcttgtgtgtccagtttcttttggccagcatcgtagggatttctccatgtagtgtgtctgcatagtttctttttattgctgagtagtattccattctgtaaacattgcaatttgtatatccattctctggttgatagatgtttagattgtttacagtatttggctattaggaatcagactactacagacatttttgtacgagtctttgtggatataaattgtttacagtttctcttatataaatatctaggagcagaattgttggatcagatagtcagtgtgcttgttaaaaactgccaaagtgttttccaaagtagttgaactatttcacactcctaccatcaggatatgagaggtgccagtgtgccccaaactcagcagcatttagtattggtagtcttttttattttggctgttctagttttaatttgcatttctctaatgactatgatattcaacaccattcgatgtgattcttactggttttgtgaaatgtctgtttattaattaaagtcttttaccctttttgttgggttgattttctttctttctttctgttttgaaggagttctttttattttttccaataagccttttgcactcctatctaggagttctttaatctgaatacgaattctttttcaggtgtatgcattgcagatatttttttcccaatccgtggttcactgttcattttccttttttctttttctttttttgtttttagagacagaatcttactctattgcccaggctggagtgcatgatggtagctcactgcagctgttctctatgaatttttaagtttctgattcatctcaaaagatgtttaaattcaaattcagtgagtggaggaggtggcagaagcataggtggccgcgaatctctaaagtgagagttgatgtgagaaggttgcacaggagactttgcccagagagcagatttccaaatcattgcctgtgaggtgaggctgattctagtgatgatgcagtccaggccatggcccaagggtgtatatgttggtgtggagtgtgggtgcaaagggcattggagtttggaactcatggttgatcctgggtggaccatcttcatggatagagccatcctaaatgatcgcaggcctcgaaggtgaaggaagagcagaagtctaggaccagagtgtttaatgagtgagggggtttaacagagttgtacttggtggaaaatcacttaggaagagtaattctgaacccacttatagcagatcaggggctgtccccccaccacatcaccacattgctgagagagtttacctaagtaagataaaagtccaggatcaggcagatcttgctgctcaaaagaggaaatgccaaaaaacaaaactcagagttttctttggtgagcaggagagacagatagcctttcactactcccgatgttctttcatttgctacagatgccagcttggagagtcacgtgagagcaagagagtagctttctggttgtcctggtgccctgctcaggcaaactgactgccattctctgaggatggcagctctgtcccccacatttggtaagttcttgggtcagtgcgtgccctgagaaagtgagtgcaagtggcccctgccacttgatggggtgaaagatacgtacaccatagagggctgctgggagaggatgggcaagtggaaaaggggtgggaacagagccccagcagccaccccagtgactgtgtctgctgagggtcttggtgggtctgggagcaggccagtgtccttatcattcatgcatgaagagggtgcaggtaatgggtaaccctgagttatctcatttattattttgatcactttcagcaaggtcacaactctagctctcagaacttgcatttcttcactcctaggttggaactatgtcacttcttatgagtatgtagcccaccaccctctttatgtttttggtggaacagggctgctctgacttgttatgaaactgatgtgtgcaagagaggtggggggaggaagagagagagaggattgaggatgtgaacactcagaatcagtgtggagcagtttcctggtttacaagtgttgtattatgagacagggcaggctctgattctcatgaaccctgttttctcctccagccacgtccacccaggattccacctgtctccaggactcagaatttcctgtttcttcaaaagaccattcctgtccccagaatttggacctgttcgtgtgcagtggtctggagcctcacacacccagtgttggttcccaggtgcactaagatctctgggtccctagagcaggagaggcacttcctggaagaccccaccagtgcatgctggaattcttgcagagcttcatctcagccagtggatgccagaacagggcccaagagagagccaaggaatattggggctgtcctggtgttggggaagttaggggaagtgatttatgtagcatctgtttccctcatgcttgcaaaatctcaggcccttgctcagccccagagacggggggaaataaagggcaaagctctcggagtgggctagaactggagggagattagtcccttgtcagggttgcatctgaagtgacggcacaggacaagatggcctcaatggggagagaggatgtctgaggactgatgcctggaggaaatgttgagccccgtagcaggccatctggaaatcctgtgttgggtctctcatgcccggtcttcaacctcagccatcttaccatgaacatcgttaggctggttcctcgctgaccccaagtttgtgtggcgttccaggaatcggtgactttccaagatgtcgctgtggactttaccgagaaggagtggcccttgctggattcttctcagagaaaactgtacaaagatgtaatgctggagaactacagcaacctcacttcactgggtaaggccagtgccatttctccacttattcatccatgaattagatgtttttgtttgagtatgttctgtgacccaggaactatgcagcggttcagaacgcagctgtgaacaagcagccccagcacccatgcttaatggggcctctcctgggtatcgaggcccatctattgcagggaccatggtggttctccggtgtgtgtctgagcttggcatgggcttctgaaatacgaaatccccattcttttggagggtcagtgtgtgggtacttgtgatcttatttcctatttctttttttttttttttttttttatttttggtgatgaagggttctcactatgttgcccagactgatcttgaactcctggctacaggcacgagccaccatgctttgcctgtggttttgttttctatcagtcaaaaacttttactgtgttccttagaaattttggcaccaccattttgctgctcctaagtcagacttgtccaccctcagaacactgaagacccaagtgttgagcccaggctactggaaggggttgtcctctgcatggccctccctcaacctgtgtctttcccgtgagtgtagggtatcaggtcggcaaacccagcctcatctcacacttggagcaggaggaggagccgaggacagaggagaggggcgctcaccagggcgcttgtgcaggtgagcgagccccaggcaaagagcggtgctgtgactctacctctattcagtgactggggtggagggaggtaggttagggagtgtcacccagggaaattgagagatgctccttccctctttttgcccatccattctctgacaaatcttttggtccacacactccttcatctttgactttcacattcccattattgggctctttgtcccattctttcatatttgatgtttctgatcatccgctttctgtcattatcaacatcatctgaattgccttaaatttcttttttcttttttttttttttttttttttttttttgacggagtctcactctgttgccaggctggagtgcagtggcatgatctcggctcactgcaacctctgcctcccaagtagctgggactacaggcatgatgccgccatgcctacctaattttagtattattagtagacatgggtttcaccatgttgtccaggctggtctcgaacacctgacctcaggtgatccacccacctcggcctcccagagtgctgggattacaggcgtgagccactgcaccaggcctgaattgacttaaatttctacccctggcattgccaaatatctcacatgaccagattttttaacaattgcttttgcaccacttttccttacatagccttaggatctgccaagaaatccacctgtcattgtcaccatcatcccaccattttccttttccaacaattaatacttttccaatttgtttcagattgggagactccatctaaaaccaagtggtcacttcttatggaagatatttttgggaaggaaacgcccagtggtgtgacgatggtaagatttccgtgggataattctggatcttccttccacgtctgaggagactggggcagcctaggttagaaaagcagttcaacaccagggcaagcagcttccctcagaggagactgtgtttcagagacactgggtattaccaagatggagacaaccctaaagctaacctcaagctactttacctagagtgtctctgagtgaagatttttatagctgtgtctcagatattgagtgttggggctcaatgcagtttttgttttattttatatttatgctgtacacttacttatcaatttagttttggtggtgtttattttttggggggcagacagtcttgctcttgttgcccagtgcagtgggcaacatcttggctcactgcaacctctgcctcccaggctcaagccatcctcccacctcagcctcctgagcagctgggactataggcgtgtgccaccacacttggctgatttttctattttttgcagagacaggatttcaccatgttgcccaggctggtcttgaactcctggagatccatcagcctcggtctcccaaagtgctgggattataggcttgagccaccatgcccagcctcaattcagtggtttttgtttgtttgtttttgttgttgtttttgttttttgtttttttttttgaggcacagtcttgctcttgtcacccaggctggagtgcaatggcacgatctcagctcactgcagcctccacctttcaggctcaagtgattctcctgtcccaccctcccgagtagctgggattacaggtgtgcaccaccatgcccagctaatttttgtatttttagtagagacagcgtttcaccatgttagccaggctggtctcgaactcctgacctcaggtggtccacccgccttggccttccagagtgctgggatgacaggcgtgagccaccttgcccagcctcaattcagttttaagcagtgaagaaatgctatatgcaaaaagctttgaaaaagtaacacatgtggagccttgtggcctggcattcacctattgtccttgatggagctcaaatggggcagggacagcacgtttgcacggcagatggttacagctctagtcatagtaatgtgcttctatctgttcatagcagtgtatgtggggatgacgcttagggttgcaatgaatatgagaattgcctttgtcagcacttacgtcttaaccaacaggaaagagccggtcttggagagaagtccactgaatacgctcacttgttcgaagtctttggcatggaccctcatctcactcagccaatgggaaggcacgctggcaagaggccctatcaccgccgcgactatggggtagcgttcaagggcaggccgcacctcactcagcacatgagcatgtacgacgggagaaaaatgcatgaatgtcatcagtgccaaaaagccttcaccacgagcgcgtccctcacacggcacaggagaatccacaccggggagaagccttacgagtgcagcgactgcgggaaagccttcaacgacccttcagcccttaggagccacgcaagaactcacctcaaagagaagccctttgactgcagtcagtgtggaaatgcattccggaccctctcggccctgaaaatccacatgcgagttcacactggcgagaggccttacaagtgtgatcagtgcgggaaggcttacggccggagctgccacctcatcgcacacaagagaacgcacaccggagagaggccctacgagtgtcacgactgtgggaaagctttccagcacccctcccacctcaaagagcacgtgaggaatcacacgggggagaagccctacgcgtgcacgcagtgcggcaaagccttccgctggaagtccaactttaatttgcacaagaagaaccacatggtggagaagacctacgaatgtaaagaatgcgggaaatcctttggcgatctcgtgtcccggaggaaacacatgaggattcacatcgtcaagaaacccgtggaatgtcggcagtgcgggaagaccttccgaaaccagtccatccttaagactcacatgaactctcacactggagagaaaccatacgggtgcgatctctgcgggaaagctttcagcgcgagttcaaacctcaccgcacacaggaagatacacacgcaagagagacgctacgaatgcgccgcctgcgggaaagtcttcggtgactatttatcccggcggaggcacatgagcgttcaccttgtaaagaaacgagttgagtgtaggcagtgtggcaaggccttcaggaaccagtcaacgctgaagacgcacatgcgaagccacacgggggagaaaccgtacgaatgcgatcactgtgggaaggccttcagcataggctccaacctgaatgtgcacaggcggatccacaccggggagaagccctacgaatgccttgtctgcgggaaagccttcagcgaccactcatccctcaggagccacgtgaaaactcaccggggagagaagctctttgtgtcatccgtgtggaaaaggctccagtgagcgcgcctgctttagagacacaggatgattcagaccggaaacagacctcgtgggtgtaagaggaagcctctgtgagctcgcaccttactgggtgcaaaagaatccacggaacttgggagaagtccagttcctgtaaaaactgggaagacgaggcgttctcatcccataggaggtttgtgagaactcacgccgggggtgaaaatgtacgtctgtagcatggagaagccttcagggtacattcagctcttaacaaacacaggaggacttaatggcagcttggcatttaatgtcaaaatccaagccgtggcatttaatgtcaaaatgacttcagaccacttctagccttctgggcccatgagtaataatgagcacactagggagcatctctgtaaacacagtggctggggaaacccttcctagtctcacttgattcctcatgacggaaatcacactaaagagagaaatcagtgaagtaaggaacgtggaaggtcatgaatgggccgcaaaccacggccagctgcttgtctttgtatggcttgccagctaacaatagtggttccatctttaaggaagaagaatgtttgatggagaaaatttgtggccaatgaagtctgaaatacttcctgtcatctgcccctttccagaaaaacttggccgacccttggtctacagcacgggttctcagtcgggcgacgatttggctgtctaggcgtcatttggcaatgtctagagacatttttggtagttagaatggggggaagatactcctgacttgtaataagaagacatcagagatgctgctaagtcggctccagcacacaggagccccccacaacgaagagttagtgcccccaaacgtcactgttgctgaggttgaaaataatcatgcagtcattcctcaattactgcctgcagcaattcctccatttttatgaatcttgtgagcacttacgctaggagaaatttcttttacaaaacttttaaaatacaattagtgctgataattcctatgtggaaatgattccagccatggtcccctcacttgagcatgtgaatattctcacggagagaagccccagcgagattttccggtgaatacgggattgcacttactctttcatcacggaaacagaccccccgagagaagccccaacgagattttccggtgaatacgggactgcacgtactctctcatcatgaaaacagagccccgttcataaatttttcatctttatttttaaggttatactcctctaaataacccttaagcctcatcaagaaaggtttgtttatagtatttttactatagcttcatccttgataacgtcctaatttccttctggacaacctccttgaccaatggcatattgagatctatgtgacatgaggatatttctcagtaccactttgttactggtacctgatgcacacggattgcgaccagagcatgatgcctccatcaagtggtaatatgtttgcagcctgctgtccagccaagagtgacagatacttctagtgacttccccggtatccactctcatcttcttccaatatcaagagaatccaggttctgtcagattagtaaggtgtgctaatctaaattttaaaaaatctcttacaggttttcttgcagctggtaccatccatgtctcacagccctggccactgacagatcagcagatgtcaccacatgggcttctgagaaagctcttgaatggggatcgttcttaaacatgaattcctccctgtatgttttgttctttgctttacttttcaccttgcaaagagatccagtacctagtattggaagatccaccttaacgaccgtgcatatgaaaaccacagtctaaggaagtgactgcagaaagctcacagcgaccctggcctcccctgtggcctctttgagtgtctgcagcagccctggacttccagacttctatcacatgagaaaaaataaaactgattattggtttaagctgctatggatatttcattgtttttcttttaaatttatttattttaagatgggggtctccctatgttgcctaggctagattcgaactcctgggctcaaacaatcttcctgcctcagtctcccaagtagctgagaatacaggcatgtgccaccacacccagcttgtttttctatttcatttgtttattggtgggagggggtttctacacccagctggatgctgcctggagcccatacacctggtcattggtcagttgtgtggtttttttttgtttttttttttttgtttgtttgttttttgagacagagtcttgctctgtcacccaggctggagtgcaatggcgcgatctcggctcactgcaagctctgcctcccaagttcatgccattctcctgcctcagcctcctgagtagctgggactacaggtgcccgccaccacacccggctaatatttttttgtatttttagtagagatggggtttcaccgtgtgagacaggatggtcttgatggcctgacctcatgatccgcccaccttggcctcccaaagtgctgggattacaggcgtgagccaccgcgcccggccatgttcagatgactgattagcctatcaaaggcattcttccgtttctttatggtggctttgatttctgatctttccttctgattctttgagtctctatttttctgctgatgatgtagggcagatgagcccccaaactgggggttagcccaggagggttcttggctttgctcaggaaagaattcaagaggcagccagcagtaaaagaaattgggtttattgaagcagcagggcacagcagagtggctgccccttgtggagcagggctgactcataggcagtatacccagggtagcagcatataggctgttggctagcagtatttatacccagttttaattacatgcaaattaaggggtgggctattcagacagcactcctcattcaccttccaccatgattgtgaggcctccccagccatgtggaactatgagtccattaaacctctttatgaattaggcagtctcaggtatgtctttattagcagtgtgagacacagttgctccggcctataaatgacacatagttttaagtctgtttcctgcagttctcctatgattggccagggttttgattctgttttgtttttttgcattttcaaattaagggtagatgattctgagggtcttgctccagctctgtctcaggcccccccaccagctatccctctttcttgcagtttacctaacagagccttggggtgggcatgtgtgggaccgtggtgctaagatttaatgctttttctcattttactcatagttatgttgcaattttggcattctctatgtcttaaaggcagtgttgaaggtatagttttgtgtagaagattcataggtgtggagttacttcacagcatttgaaaggggatttggggaggttgcttaccactcactggccattgtttttagttacctggaagtctcctcaccttagtttttggagatactttggctgaatatgttattttattttattttaatttattttttgagacagagtgtcgcccaggctggagtgcagtggcatgatctcagctcactacaacctccacctcccaggttcaaacgatcttgtgccttagccacctgagtagctgggattataggtttgcaccaccatgcctggcaaatttttgtatttttagtaaagttgaggttccatcacgttagccaggctggtcttgaactcctgacctcaggtgatctgcctgcctcagcctcccaaggtgctgggattacaggtgtgagccaccgcgcctggtctggatatgctttaaaggggtcatttctttgtcttctggcctccattgttgctgactaaaagttagcgttattcttaacattattcccctgtaagtaatgtaagtaatgtgttgcttgtcactggctcctcttcagataattatcttgggttttcaacagtttgactctgtgtcttggtgcagtttcctgtgcatttactctgcttggggatccttcagattcttagatacgtgagtcactgtctttcacaaggaagtatttggccattatttcttcataattttttaattgtggtaaaataaacataacatgaaattcactgggtttttttgtttgtttgtttttgttttttgaggcagagtctcgttctgttgcccaagctggagtccagtggtgcaatcttggctcactgcaacctccacatcctgggttcaagcaattctcctgcctcagcctcctgagtagctgggactataggtgcgcaccaccatgcccagctaatatttgtatttttagtagaaatggagtttcaccatgttggccaggatggtcttgatctcttgacctcatgatccacctgcctcggcctcccaaagtgctaggattacatgtgtgagccaccgcgcacagccccattttaatcattttttaggtgtactgttcggtggcattaagtacattgacaatattggctaccaccactatccattttcagatctttctcttcattccaaaaaattatgtacccattaagcaatcactcctcaacacttctatcttcagcccctggtaacttgtaggtagtgtccatgaattttgtcagaagtagaataataaaatacgttgttttgtgtgcgtctgccttatttcattaaaagtaatgttttcaaggcttatccatgttgtagcatgtatcagaatttcattcccttttatggcttaataaattctgttgcatgtatgtgtcacgttttattcattcatctattgatgaacatttgggctgtttctacctcttggctattgtgaatcatactgatattgatgatttttttttcttttttcttgagatgcagtcttgctctgttgcccaggctggagtgcagtggcgcgatctgggctcactgcaacctctgcctcctggattcaagcaattatcctgcctcagcctccaaagtagctgggtactcgccgagtagcctgccaccatgcccggctaatttttgtatttttagtagaaacggagttttaccatgttggtcaggctggtcttgaactcctgacctcaggtgatatgcccgcctcagcctcccaaagtgttgggattacaggtgtgagccactgcgcccagcctgaagacagcattcttagcatgaaggatgcaaagttgaggcaaaggagatctatccaaaccaacctcattacactacggcttctgagccacttctctacctgattaaccaccctagcccacacccttggttttatcccattagcgcagtttacttgtctgtccaattcagtttataagtgtttggctcttaactgcttttctggcttgtttccttatgaggaaccccatgccacataaaactttcattaaacaaatacatgtgtatgctttaatcttgttaacctaatcgtatgtcggtgtaattatcaggcccagcaaggatcctaagatgatgaaggtgaaatcttgttgcccctacaatatggacattggatgcaagtgtctgtgtgagttcctgctttcaattctcaggaattttccgaagttgttttcttcctcattttctccttttgggactccagctgcgccacaggactctgaagttcctgtttcatttttctaatgtgtttgttttccagtttgtatgacttctactgatatatcttaaagttcactaactcttctgtcctcttcatctgtggaatccatttagtgactccttaaaatccagatgtctgaggtccttaggaaaacaggtgcttctccctgttgtagcttgaatttgctctgaatgtggtggtcccctaagccaataacacaatgcctcctggcctgccctggccacccagggaggaatgaagggagaggtaggtgtagtggtaataagccttgctgtgcacagctttgtgtaataactgaaaagggtgatgtgttttcctgctcccatccccaagcctgatttcttcaagatgcagtaactgggacgggtgcagtggctcatgtctgtaatcccagcactttgggaggccaaggagggaggatcacgaggccaagagttcgagatcagcctgaccaacatagtgaaacctcatttctactaaaaatacaaaagttagccgggcgtggtggcgcgtgcctgtagtcccggctactgggaagctgaggcaggacaattgctcgaacccgggaggcagaggttgcagtgagccgagatcacaccactgcactccagcctgagcgaaagagtgagactcggtcaaaaaaaaaaacaaacatgtagtaactgacaccccccacacatgccctcccctccacctcctgttatttcattagaaaccctgccaaggaacaaggaaatcctacaaagaaggtgtctcaggtacccatcagcagccatgcagtgatgacaagtgggtctgatgccattaaaaggttgttttcaaaccaccttctgttgcaagcagaacccaattgcacaggaatccaagctccatgatggagctttggccattgtttttagttaccaggaaggaaaatggcaagattgagattaagcctggaggcccggcggggacctcatggctgtgaagaccctggactcctgtgttgctggagatagtgtttgtgctctcacatggtctgctcagccgtctttctgccattcagcacaacggaaggacctagtgtgtttccagggtgggagcctacgagtggtggactctgactttgacattcgggacagatttattccttaattttcttccttacatacttggttcatctgagggcctcagactccctctccaacagccttctaccctctcccatttccacattttcatttttgagcttccttagctaagtggttttactttcttccctttccatctctctctctctctttatatttctttctctagatttttaaaattctgtctctctcttttctccaatttctccatttccctcttttttttttttttttttttttttttttctttttctaagtcagggcctgactctgtcgcccaggccaagtgcaatggcatgatctcagctcactgcaacctccacttcccaggttcaagggattctcttgcctcaccctccaaagtagctgggattacaggcacacaccaccacacccaggtaattttttgcatttttagtagagacaaggcttcaccatgttggccagactgatctcgaactcctgaccgcaagtgatcctctcccattttggcctcccaaaatgctgggattacaggcgtgagccactgcgcctggccttacattgttattctgcacacattggccattgcgggcatcgttccttacctgagtgaacacatccatgcattcctaatatgtgtgtcctgggaaacctgggtttggagtttggagtttggagtagagaggccaagggtttgcagtcaggcaggttacttgcaaaatatttacgtatcagtcagatacattggctcatgcttgtaatcccagcagtttgggaggctgaggctgggggatcacatgaggtcaggagttggagaccagcctggacaacatggtgaaatcccgtctctactaaaagtacaaaaaaattagctgggcatggtggtgcatatctgtattcccagctacctgggaggctgaggcaggagaatcacgtgaaccagggaggcggaggttgcagtgagccgagattttgccactgcactccagccttggtgacacagcgagactgtgtctcaaaaaaaaacaaaaacaaaacaaaaaaaaattatatatatatatatatatatatatattatgtattgtgctaagtttcttctttgtaaaagcccttgggggactgttaagtgtgtgtctcagcttggatttgggtttttttagaccagagatccctggtccctttggaggtgtgagtatgagggtatttgtgtctcttgagaaggtctaagagttgccatcagtttggtggcagggtatgttgtacttagagatcttgtcagaatggataactcattttacctccatcacttacgaaatgacttttatcagctacattaaaatgctagcaatgtcatactacattctcataaatactgggaattaactaatgactttcttgtccaggtatttataggctttggcaaggcagcagtacacaaaactggtcccattcatagtaatcttgacgttaaactttggagccagagtacaagcgaataaataaacactaggaagaaaagtaaatgcggagaagaataaatgctgtgaggaagagtaaagttgaggaggggaacagacagatgggattgacccgttcaacctgtgcagtgtacagcgtatactcttttttttttgagatggagtctcgctctgtcgccaggctggactgcagtggcggcgatctcggctcactgcaacctctgcctcccgggttcaagcggttcgcctgtctcagcctcccagatagctgggactacaggcacctgccaccacgccctgctaatttttttgtattttagtagagacaggggcgtacactcatttttggccactttacctttttaggaaacaaaatcatcacagaaatcctcaagaggcagctttcctgtacatttcagtttctcctaaaacagaacagggctgggaatgcttactgaggaatcatcaaagcatttctttctgtcatgacaagagcaattccagcttgctccatgagaccctgcttctctcactgtatttggttttcaggttgcaagatttgaagaacacttgtcaaaactcgacggttatttctgttttcaaggactgtttgatctgcattttcttccagtccattcatttctatctggtttggcctccaaggtcttaatcttttgcccaagaaaacgcttacatttaagcaacatgagttccttgatttgtctgtagcccaatgctactttcttgagttcagaataaaagctgattattattattatttattgttattattattttgagacagagtcttgctctgtcacccaggctggagtgcaatggtacgatctcggttcagtgttacctctgcctcccaggctcaagcaattcttctgccttagcctcaggagtagctgaggttacaggtacccaccaccatgcctgacaaatttttgtatttttactagacagaattttgccatgttggccaggttggtcttgaactcctggcctcaagtgatctgcccacctcggcctcccaaagtgctgggattacaccagccttgggacttgacagtttttttttttttttttaagatggagtttcgcccttgttgcccaggctggagtgcactggcgcgatcttggctcaccataacctctgcctcccaggttcaagtgattctcctgcctcagccttcctgagtagctgggattacaggcatgtgccaccatgcccggctaattttgtatttttagtagagacggggggtctctccatgttggtcaggctggtctcgaactcccaacctcaggtgatccgcctgcctcggcctcccaaagtgctgggattacaggcgtgagccaccatgctgggcccttgacagttattttgacctaacattggtgataatttttctctacctcaaccaagaagatggcggattggagcacttttttcatagattgaccagtcttcccaacaacactggaggccagtcatttactttctgcagagaaagagacatgtcaaagagtcaacttaccagctggaaactgggactagtgtcaagtgcttactctgacattcagctcttgtttcacctcttgacccctttcatgcctgcatcaaccagtggatctgctgggctcagagcacatgacaaaggggcttgtggtgttccacttggcttcctgaaatcccttcctttcccctggcagtgcttccacgcaggactttgagtgtgtagtcggggcagtttacatccccaagtgaaaatgctgaacgttcagcaagccttggtcaaaagttttcctaggctcactagtgaagaaatagcaattactcactggctattgccaggattgagaaaaagaatgtgtaccctagaggccgggcccaaggggaagagagtactttctctcagcattgagtaaaatcggccattttttaaatgagccttgggaaccagcataactggtccctttgtgcccaatttctccatcccgataatgaattccatggataacctcagtggcccatgacagttgcctctcattgcacttccctgccagttctcagaaagaaagtgtcacacagtctctggagggaacttctaattacaggaacacagtctgcttgtctgagtcttgttttcagttcttggaccctctccagcagggaaaatctctgtcttgtgtaacctttgggtaacatccaatccactcaggaattcttccctgctagggaacctattgtatatacccaatgaatattagctaagtgccttacacttttaattaggttttgggaagaaagatcaataagacaaagtactgcccttaagaaagtaaaggtctaggagaagagcgatattaacagtaaataagacacctagtatggcaggtgaatccatttgggaggccccagatgaggaagatgttgaactgggggccatcaagaaaatctaagtagaagagatgatgcaagctcagtgtagaaggatgattatgattgtgattatgattatttggagatggagtctcgctctgttgcccaggctggagtgcagtggcgcgatctcagctcactgcaacttccgcctcccgggttcaagcggttctcctgcctcagcctcccgagtagcagggactacaggcacacgctgccatgcctggctaattttttgtattttagtagagacaggttttaccgtgttctcaggccagtctcaaactcctgagctcaggcaatctgcccacctcggcctcccaaagtgctaggattacaggcatgagccaccgaggcctgccttgtagaaggctcattaagagttcaggagcagaatcaaataagcatgctaatcctgagtgcaaaggcactgaaaaaatgacagtatattacattctgtagataaaagacaatctttggagtaagaggcagacttgaaaggtaatatgggacagattggagaacacacacatttcctttattctctctctttttttaaagactcggtctcattctgtcacccagattggagtgcagtggcatgaccatagctttctgcagcctcaacctcctgggtttaagccatctgccaacctcagcctcttaagtacctggactataggcacacactaccatgcctgactaattctattttttttatttttgtagagacacagtcttgttatgttgcccaggctagtctcaaactcctgggctcaagcaatcctcctgcctcagcctaccaaagtgctgggattacagtcatgagccactgtgcctggctcacacacatatatctatatgttagtctactagtttcaatgtaaatgttagttggaaatcgatggaaacaaattgatattcaatgaagtttgcagttgagcaaggtaactggttcccagttgcggaatggaatgaagggtcctgtttctatgagcttttgtttcatagccacccaaaacatggtggtttaaagcaaccaccaggccgggctcagtgtctcataatcccagcagtttgggggccaggcaggaggattacttgagtccaggagttcaagaccagcctgggcaacatggtgaacccccgtctctcaaacaacaacaccccaccaccttttatttagggtttgtttgttgacaatttgggctgtgcttagcctgagagttctcttgactggcttctgcagtcactgtctaggtggggtggggtttattgttcttcgttcaaggtctcattcctccagtcgtccaggtaaggcctgttcacacattgctggagtgttccagcagagcttgtattgggaatgcctatgccccatcagccagtgcaatcatgggtgagcccaaggtggaagggcactcagttacacaaaaggggcttggatatagggaagaaaagacacagtggccattcttttctgcagttggccacaaggccagtatattattgcaagagtctaagtaaggggaacatctttattgagaagtgatgaacatgtgggaaattcacatatttatttatttatttattttttattttttttttttttgagacagagtctcgctctgtcacccaggctggagtgcagtagcgcgatctcggctcactgcaagctccacctcctgggttcacgccattctcctgcctcagcctcccgagtagctgggactacaggcgcccaccaccacacccggctaattttttttgtattttttttagtagagacggggtttcaccatgttagccaggatggtctcgatctcctgacctcatgatccgcctgcctcggcctcccaaagtgctgggattacagacgtgagccaccgtgcccggccgaaattcacatatttaaagtatacaacctgatcaattcccttctctctgtcttatcataatactttccctggaaacttttttttttttcttgagacagagtctcaccctgttgcccaggctggagtgcagtggcacgatcatggctcactgcagcctcaacctctcaggctcaagtgattctcctgcttcagcttcctgagtagctgggactacaagacacatgccaccatgcctggctagtttttgtattatttgtagagatggggtttcgccatgctaccctggctggtatcgaactcctgagctcaagcaatcctcccatctcggcctcccaaagtgccgggattacatgcatgagccaccgtgcccggcctgattccaggtctgatagaaaaactcaaccaactgcctattggaaaaactttgaatctgcatatgacctggaagccccacttccagttgtcccacctttctggactgaaccaatgtacatctttttttttttttttttgagacggagtctcgctctattgcccagactggagtgcagtggcacatcttggctccctgcaagctccgccttctgggttcatgcccttctcctgcctcagcctcctgagtagctgggactacaggtgcccgtcaccatgcccggctaattttttgtatttttttctggtagagacggggtttcaccgtgttagccaggatggtctcgatttcctgacctcatgatccacccgcctcagcctcccaaagtgctgggattacaggcgtgagccaccgcgcctggccgaaccaatgtacatcttatacgtattgactgatgtttccctaaaatgtgtaagaccaagctgtagcctgaccactttgggggcacatgttctcagggtctcctggggttatgttatgggccattggtcactcatatttagctcagaataaatctcttcaaatattttacagactttgattcttttcaccaacatccatatgagaatttagttcatcatacagacatatcacaagtcaagtcagaaaaggcaaattatgtaaaaaaaaaaagtgcttaggaaactagaaaactagaaaatttttttttaattaaaaaattttttaaaaattcctaaataaataactgatagaaaagagaatgagggctgggtgcagtggctcacacctgtaatcccagcattttgggaggccaaggggggaggatcacctgaggtcaggagttcaataccagcctggccaacatggtgaaaacttgtctctactaaaaatataaaaattagtccagtatgctggcgtgcgcctataatcccagctacttaggaggctgaggcaggagaatcgcttgaacccaggaggcagatgttgcagtgagccgagattgtgccactgcacaccagcctggatgacagagtgagactccatctcaaaaatatatatatttttatatatttttattatatatattttatttttatatatatttattattatatatatacatatatatatatatatagcaagaattagatgccattttaatagactttatttttttagaacgtccaccaatgctgctttgattcaagtccacatgatctgtcatctgggctgtaggtagcctggcacccttcctgcccattctgcaggggaacatcattgtacacattttttttttaacacccggtgctcttacttccctccagaaggaaacctaaactccagtgtcctccatgatctgactcctgttttttgctccaactccatctcttgttccatcaccctcctgtcttctaatccatcctttgtattaagaagcaaattacctaaaccttttaaataaggcaaaaggatgaccgcattactgttcagtatcatgctgaagcattgtctgacaggcctagctagttctttccttctcaaggcaatgttcgtttgtttgcttgagacctggactctgtgaagttattgccaacccacagggaattaatcaattgcaaatgatttttgtccagtcgagttgcaaattacttcaattgcttctgttcagttaaaaagattacccctaaatggccaggcgtcatggctcatgcctgtaatcccagcactttgggaggccaaggtgggtggatcatttgaggccaggagtttgagactagcctggccaatacggtgaaaccccatctctactaaaaatacaaaaattatctgggtgtggtggcacatatgcctgtaatcacagctactacgcctcaggaggctgaggtgggagaatcacttgaacccgagaggcagaggttacagtgagctgagattgcgccgctcactccagcctgggtgacagagtgagactgcaccaaaacaaacaaatgaaaaaaaatgaaataatgtgttaataattttatattaaaaattatatttcagaaaaaatatttaccccttttttttttagacggggttcgcttttgttactcaggctggagtgcaatggtgcaatctcggctcactgcaacctccacctcttgggttcaagcaattctctcgccttagcttcccaagtagctgggattacaggcgcccacaaccacgcacagctaatttttttttttttttttttttgtatttttagcagagacagggtttcaccatgttggccaggctggtctcgaactcctgacctcaggtgatccacctaccttggcctcccaaagtgctgggattacaggcatgagccaccgtacccggccaagcacattttgttgtatatttgaagtactcgaaatttattcctgcaaaccacacagatttttgtacatttaattttaattttaaaagatctgtcagtcattgacagatgaatggataaacaaaatgtgtgtatatacatataatataatgaaatattttgtggctttaacaaagaacattctcctgagcatggtgcctcatgcctataatcccaacactttgggaggctgaggcgggaggatcactcaaggccaggaatatgagaccagcccggccaacatggtgaaaccccatctctactaaaaatacaaaaattagccggacatggtggcgcacacgtgtaatcccagctactcgggaggctgaggcaggagaatcgcttgaacctcggaggtggaagttgcattccagcctgggcgacaagagtgaggctttgtctcaaaataataatataaaaataataataataataaatagaaaaacaacaaaaaataaaaaacaaattagctaattgggagactgatgtgggaggattgcttgatctcaggtctttgggattgtaatgagctatgattgtgccactgcactccagcctaggtgacagagtaagaccctgacaaaaaagaagaaagaaaaaaaaagagagaggagagagagagagaaagaacattcggacacatatacagcatacatgaaccttggcaatatttcacttaaatgaaataagtcagtcacaaaaagacaaacagtgtatacttccgtctatgaagtaggtaccacagtcagaattatagagacagaaagtggtatggtggttcattaggggctggggagggtgaatgagggatgagtgttacgggacagagtttcagcttggggagatgagaagattctgaatatggaggatagtgatggctgctgtgaatatacttaatgccactgaatagtacacttaaaatggttaagatggtgaactgtatgttatgtatattttaccatcattttaaaaattgaaaaaaacttttttcttattgttcagttcctcccaaacttgccatcaatgaaattttccccatcactctacccagatcgctgtttctaatgttttccatgccattaaatgtgatggatattcttcagcctttattttgcttagccttatagcatcgttttacatggttgttagaaataaatcttggagtcataaagaaaaatgagcactcaaacaaaggatttctcagcaaagcaaatttacttctgcgcagaagggtgcttctcgtagggttggctgctacaagagcaccctgaacaaaggagagtagcaacttttattcttaatgcgactcttgactttgtgtgtcctttccccattggctggggtcggacagcacaatctaaactagacttgattggttacacatttaaactgtcttagataaggtgggtgtgtgatgggagacagaggagaggaggaaggggtcttctacagaggaatagacagctagtctattcttaaataaggaaagaaatgtgagctggggctatggcatatctgggcatgcagcaaaatcagaaagaagaaaaggagaagaaagtgtgtggggggggtacttggaattagagaataagaagctgagcaggctgtttgaagagaaatcttgctgtatctcgcaatggttgactctccctctcttgaaacaggacttacgacatgtccacagcctgtttaacgccctgcagccaacgcgatcacaggggattcacggaaatagttgcatctctattttcttctgtgttaccttgagacccttaggcactgggattacagagagatgggtctttgtagcttctgcgacacattccagaggggaaaacctctttatctcaaagccaaaccaatagtgatgaaagctcttccaagaataaagaggccccaagagggtgggaggtgcagagagagtcacctggcttcagagctgccttcttggaaacagaattagaacacatcatacctttctgccatttgctcttgatcccaagggagccgaatgggttggagagtagaacatcactggaacagtggatttaatgaggaaggatgagacatcagctccctggggcttgagaaaccataaatacttccctaaaacacctcacctggacagtttcctgacgccacactcatgcatcttagagaggagagttaggatgacttcatgacaagttccatctccccgcctttccctgctagattctgtcttcagcattcaacagtcaggggaggaagacgtcataccagcatttttttttttcaagcaatgtcagttgagtgactcacactatccttgttagtaccgtgtgtgaaaaggatttaaaaagtagtgtggggaggaacagagatggaggtaacagggttgataatgtctcatgatttttaaaatgtctctaggattcccttacctggttatagatgtcttaaggcattgcaacttttgggaggctgaggcaggcggatcgcttgaggccaggagtctaagacaagcctggccaacttggtgaaaccccatctcatctaaaaatacaaaaattagctgggcatggtggcggatgcctgtaatcccagctactcgggagcctgagtcaggagaatggcttgaacccgggagacagaggttgccatgagccaagatcacgccactgcactccagcctgggtgacagagtgagtgagacgctgtctcaaaaaaaaaaaaagattctattgcaactgtttctgtcacctccacctctgatggcctttcattctggaaactagtgactttctcaatgtcagtaggaactggcacttccttgagtggattcctttcagtctacctgctaacaccttcctttttcttctctagtataatataatagttctcggccgggtgcagtggctcatgcctataatcccagaactttaggaggccgaggcgggtggatcacaaggtcaagagatcgagaccatcctggccaacatggtgaaaccctgtctctactaaaaatacaaaattagccgggcatggtggtgtgtgcctgtagtcccagccatttgggaggctgaggcaggggaatttcttgaacctgggaggcagaggttgcagtgagctgagattgcaccattgcacttcagcctgggcaacaagaacaaaactccgtctaaaaaaaaaaaaatcaacaaagcaaagcaaaacaaaacaagtatgtattaaatgttcactctgcaccagatgttacatatattatcattgcaattgtgaatggactttttttcctcttattttttctcatggctgtttgcagatacataagaaagctgatgacactgattagttgtaattaattgtgtttaagttgactttttttttttttgagacagggtctttctgggctcaagcaaacctcctgccttggcctcccaagtagctaattttttaaaaatctatttttgtagaggcaagtgtctcattttgttgtctaggctggtctcaaactcctggcctcaagaatttctcctgccttagcctctcaaagtgctgggattacaggcaggagtcacagcacccagccaggctgttacattttattaaatgaattttagcttatgttaaaaccatggtttctttttctgccttgctctattcacgcatatactttgttatctgacttgccgatattaaattttttacactcttaggataaatattcattagtaatggagtgtgttattttatccaaaagataacttcatttcactcccctttcaggcttttgcatctgttgtcaacatgagattaatttgcagatttcttgtttgtcttatatgtgatttttttttttttttaccttcattcagctttccatgatgagtacaaagccttggggaatatctggataaagtaaaattttctagaatgtgatctggacttgccacaaagaaacttcaggttcgtcgggcttcatggtgtatttgtctaaatatttaagtaaaaaataatgctggctgggcacagtggttcacgcctgtaatcccagcactttaggaggctgaggcgggtggatcacctgaggtcatgagtttgagactagcctggccaacatagtgaaaccctatctctattaaaaatacaaaaattagccgggtgtggtggcgagcatctgtagtcatagctactcaggaggctgaggtgggaggatcgcttaagcccaggaagtggaggttgcagtgagctatgatcatgctactgcacttcagcctgggcaacagacccagaccctgtcaaaaaaaaaattgtttcacataactacagtgcaatgatcacaatcaggaaattggcattaataccatattatatatagtattatagatatataatacactatttgctatatactatattagtaatatagtaattagtatatagcattaatataatactataaaatttacagagctcatttatattttatttttttatttcttctcatttatattttaattatcccaataatgtcatctatagcaaaagaaagactcaagtcatccattacatttgattgatatgtcttttttgcctcctttaatctggaacatttcctagacttttttttttttttttttttttttgagatggggtcttgctctgtcaccaaggctggctgggttgcagtggtgcaatcatagctcactacagcctcaacctcctgggctcaggcaattctcctgcctcagcctcccaagtagctgggacaacaggcatgtgccaccatgcccagctaatttttgtattttttgtagagaaggggtttcactatgtttcctaggctggcctcaaactgctaaactcaaacgatactctcacagcctcacaaagtgctgggatcccaagtgtaagcctccatgcctggcatttctttgtattttatggcactgacatttttgaagagcacaagtgagatattgtgcccctcaagctcagtttgtgtgatgttccctactctttaaagttctgcgtctttggcaggaatcccacagaaatgatgtttcgctgtttccagtgaatcctatcagaaagcacatgtttattatgtcccattaagaatctccttgaccatgtaataggggtgctataaaatcagtgttaagatagatggttgggattagagagtccattttctagaattctattttgtttgggacgttataaaatggatatttaatatgggtggttaactatgagatatttcctcacgcctgttagaattgtttattattattattcttttacctatgaattggcatttttgtttatttatcagtttgtgaaaatgtccttaatttgttgaggtagcaaacaaatttcaactttgattgctatgcaaaaccagaagataatctgctttgcaatgaactttatacagttcagctgcatataggcaacatgctatatatgaaaaaaatactaactgaactacaggtattaaatactgaaatgagttaacagtttattataatttattgtatttaacaatctaggaagttcgcagccatcagcagttctagtgcaatttcaggcgcaactgggaattcgggaatctcggtggagctgttagcgtagcgaaccttgtacataaaatacatgcatactttatttatttatttatttatttattatcattattattattatttttgagacggagtctcgctctctcgcccaggctggagtgcagtgtcgcgagatctcggctcactgccagctccgcctcccgggttcacgccattctcctgcctcagcctcacgagtagctgggactataggcgcccgccaccacgcctggctaattttttttgtattgttagtagagacggggcttcactgtgttagccaggatggtctcgatctcctgacctggtgatccgccctcctcggcctcccaaagtgctgggattacaggcgtgagccaccgcgcccggccacatgcatatacttttgatagcacatgtgaagggatctctctaaaatggacctcatcggcttcgttctcagcaaattgacctgggccactcaacatggcttttatcgtgcccgatgttaatgcacgttcttttttgacaataaattcatggccatcagataatatcaatttgacatacacggcatcagggccttcacagccaccgtaggttttcttctcaccatccattttgttcttacgaaattctactttgcttccccaggaactttagtagtttctcgtcaggcccacagccagcgcagcagggtccgtgtgtactgccacagcccctattccaaggccgccccaccccgccccgccaacccagctgcctgctcccgtgggtgggttccggggcagtggaaagaattacttcagctgggtcagagccgctttctgtgactggtgggagatccgtgtaattttttattttaagacatggtctcgccctgtcacctaggctcaagttcagtgtcacaatctcagctcactgcatcctcgaacactgtggctcaaagcgatcctcccgcctcagcctcctgagtggctgggactacaggcacatgccaccatgcccagctaatttggtttatttttttgtagagagcaagtcttactgtgttgttcgggctggtcttgaactcctggcctcaagcaatcttttcatctcagcctcccaaagtgctggtattacaggcgtgagccaccatgcctgaccttagaattattaaccattactagcggttagctaacaattggctctattattagctaactattaactaactattcactattattaaaaagacaagagttggccgggcgcggtggctcacgcctgtaatcccagcactttgggaggccgaggcgggcggatcacgaggtcaggagatcgagaccatcctggctaacacggtgaaaccccgtctctactaaaagtacaaaaaattagccgggcgaggtggcgggcgcctgtagtcccagctactcgggaggctgaggcaggagaatggcgtgaaccccagggggcggagcctgcagtgagccgagattgcgccactgcactccagcctgggcgacagcaagactccgtctcaaaaaaaaaaaaaaaaaaaaaaaaaaaaaaaaaaaaaagacaagagttggcaagggtgagaagaaaagggaaccccttgtgccctgtcggtggtaatgtagattggagcagacattatgggaaatagtgtgagggttcctaaaggaattaaatagaggccgggtgtggtggcttacgcctgtaatccccagcactttgggaggccaaggcgggtggatcacttgaggccaggagttcaagaccagcctggtcaacaaggtgaaaccctgtctctactaaaaaaaagaaaaaatacaaaaaatacaaaaattagctaggcgtggtggcacatacctgtaatcccagctactcaagaggctgaggcacaagaatcgcttaaacttgggaggtggaggttgcagtgagctgagatcacgccactgcactccagcctgggcgacagagaatctgtctcaaaaaataaaaaggaaaaagaaattaaaattttgagactctttctcaaaaaataaaaataataaaatcaaaaagaagaaatttaaaataaaagaaatttaaaataaaaagaaattaaatatgatccagcaatccctcccctggatatgtatccaaagaaaatgaaattgccactcgtaaagatatctgcatgctcatgttcattgcagcattacttgcaaaagtcaagatatggaaacaacctaagtgtctgctgatggagaaatggctaaagaaaatgtgatatatatgtatatgtacatttgtgtgtgtgtatatatttgtgtatatatattccattgtgtgtatatatatgtatgtgtgtgtatatatatgtatgtgtatgtgtgtgtatatatatttttacacaatttttacaatcaatattattccactgattgataaaataggaatagatcctgccatttgccacaacatggatgaatctggaggccattatgttaagtagaataagtcagatgcagaaagaaaaatattgcattttttcacttctatgtggaatattttttttaaagtcaaatatagagaataaaacagtggttaccagaggaggggtgcggctgggggagaaaatgaagaagatgtaggataatggatataaagtagcagatatataggataaacgagtctagagatccagtgtacccatgaaaattatagtcaataacagtatgtagtattccggatttatgctacatcagtagactgtagctgttcttgctataaagaaaatgggtaactatgtaagacgatggatatgttcatttgtttcactacagtaaccattttactatctatatgtatctcataacatatatagtatacgttgaatatacagaatataattaatttttaaataattaaatatatgggtggttgagatgagagacttcattttttagaattccatttacgtatgaaagattagacaaaatgagtccataaatcacaagtaaatagtatggacaacatttctattacatgaaggatgcccgttggatgttaactgatgtttctcttaccgcttccttttaaataaataaataaatataattttaaataaatatgtatattttaaaataaatacatatatacatagttttatttttattttattttttatttttattttttgagacagttctccctctattgcccaggctggagtgcagtggtgtaaacatagctccctgcagttgcaaattcctgggctcaagtgatccttccatctcagcctcccgagtagctgggactacaggtgtccaccaccatgcctggctaatgacctcttcttttgtagatacatcagctacatggaagcaggaaaccaaacaggatttttagagtttatccttctcggactctctgaggatccagaactacagccgttcatatttgggctgttcctgtccatgtacctggtgacggtgctgggaaacctgctcatcatcctggccatcagctctgactcccacctccacacccccatgtacttcttcctctccaacctgtcctgggttgacatctgtttcagcacttgcatcgtccccaagatgctggtgaacatccagaccgagaacaaagccatctcctacatggactgcctcacacaggtctatttctccatgttttttcctattctggacacgctactcctgaccgtgatggcctatgaccggtttgtggctgtctgccaccctctgcactatatgatcatcatgaacccccacctctgtggcctcctggtttttgtcacctggctcattggtgtcatgacatccctcctccatatttctctgatgatgcatctaatcttctgtaaagattttgaaattccacattttttctgcgaactgacgtacatcctccagctggcctgctctgataccttcctgaacagcacgttgatatactttatgacgggtgtgctgggcgtttttcccctccttgggatcattttctcttattcacgaattgcttcatccataaggaagatgtcctcatctgggggaaaacaaaaagcactttccacctgtgggtctcacctctccgtcgtttctttattttatgggacaggcattggggtccacttcacttctgcggtgactcactcttcccagaaaatctccgtggcctcggtgatgtacactgtggtcacccccatgttgaaccccttcatctacagcctgaggaacaaggatgtgaagggagccctggggagtctcctcagcagggcagcctcttgtttgtgatggatcccttggccccaggactaagaagttttgtgagcaccaatggcaaaaatgttttattttgaaattcttactctttaaaattaaaaacatttttttatactttgagagtacaaatgcagatttcttaacatgcatttgcataagggtgaagtctgagcttttggcgtaccaattacctgaatagtgaacataaggcacttttttttcttttttgagacggagtctcactctgtctcccaggctggagtgcagtggagtgatctcggctcactgcaacctccgcctcccgggttcaagtgattcttctgtctcagcctcctgagtagctgagattacaggtgtgtgccacccatgccttttagtagagacggggtttcaccatcttggccaggctggtctcgaactcctgaccttgtgatccacctgccttggcctctcaaagtgctgggattacaggtgtgagccaccacgcccggccaaggcagtttttaaactctcactcccctctcaccttttgcagtctccagtgtccattattctgttataatgcccatgcgtatacattgtttagctcccaattataagtgagatcatgcagcatttgactttgtttctttactaccttacttaagagaatggcttccagtcccatcgatgttgctgcaaaagacatgatttcatccttttttatggctgagtagtactccattgtatatatcctcgatatctatatagatatagacatatgtagatacataccatgttttctttttttaaaaaaatttatttttatgtcagtagtttttggggtacatgtggtttttcattacacggatgagttctttagtggtgacttctgagtttttagtgtacccgtcacccaagtggtagtagtctcttattcctcacccccctcccaacctttctcccttcaagtcaccaaagttcattatattgttcatatccctttgtgtcctcatagcttagctcccacttataactgagaacatacgatatgttcatatggatcttatgtatgttggttgaacatacaaacaagtccaggtttttcattcctgagttacttcacctagagtaatgacctccagttccatccaagttgctacaaaagacattatttggttcctttttatggataagtagtattccatgctgtacatataccacaatctttatcactcattggttgatgggcacttaggttggttccatgcctttgtaattgctaattatgttgctataaacatgcaggtgtatgtgtctttttcacataatgactttgtttcctttgggtagatacccagtagtggaactgctggactgaaaggtagttctacttttagttcttttttttgttttttttttaagacagagtctcactctgttgcccaggctggagtgcagtggcgcgatctcatctcactgcaacctccacctcccaggttcaagcgattctcctgcctcaacctcctgagtagctgggactacaggcacctgccaccccacccagctaattcttctatttttagtagagacagggtttcaccatgttggccaggctggtcttgaactcctgacctcaggtgatacgcccacctcggcctcccaaagtgctgggattacaggtgtgagccactgtgcctggccttctagttctttaagataccactttaaaaaaagtccagtcctccattgatggacacgtaggttgattccatatctttgctaatgtgaatagtgccgtgataaacatgggggtgtaagttaacaattaatctccaagtaatttccttgatggcacttctgtcctatgtgctattcaaaaattgtgtccttgatcatcgttcttaattctccattagtgagttctgaacttgggtttgaagcatttgctatagctttgttatctcaagtggtggcacagagttcttaagctattgattgttcactgactttatttctatgtgtttgcatgtgggtttttgttgtttgtgtgttcgatcatgaacagatcaacagtgtttatttgttttcctactggatgaagtatgattaaaatacgtatttaaatatagctggttatatctctctggtgtctcttcttcttctaagaatatcagtcctattagatcagggcctgacccttatgatttcagtaaactttaattacctccctgaggaccctgtatctaaagacagtcatcatattgggggtgaggacttcactatattaattttggggggtgcaatttagtccataagagatgtttatgcagatctgagaaagtttctgccaactctatggggagctctaaagctagggctgctctttggagaattctcacattgtgtagaaataaccaggccctattaccccaggaagcgtggggccttgagggtgatagggacagagggtggagaaattctaggcagaaaagggcagttcccaggcaaaaccccaccctcaagccaaaaagcctgaaactgcagcccaaagtgagaacttatatccctgttttctcgcttggatatcaccttttcctaaaccacccctgaccctgcccaaccccatgctatgcctataaaaaccccagactcagccagtagatgaaactatggctggacattagagagaagcagctttgacctcagaaggacagctcgatggtataacttcagagaagaatttggcaggagacgactggacttcattacctgcctgccccatcccttttccagcttcccttacctgagagccactttgatcagacataagatccctcctgcatttaacatccttcaattcgttcatgcaaccttatttttcctagatgctggaaaagtgctcaggagccacaagtgcggttacaaaagcctgtcatactggccctttgccctcgctggtggagggcagccacttcatgcaaaaaggcaaagggcccactgagctgttaacacttaacaccccaccctaatcttttattatgcagatggattctctatctggccggcgccatgttgcctgtgtctttactgcacatgggctgacaaagaaaaggaaagatggagactctatgctgaacgtgtctggctttcaagtagccctttcctattggcgcagctgctaggattcacccatgcaagcttgcagttgcttatctatgtctgcagcttgatttttcaggcttctctttgtcagaaaagaaatgatttgggggttgctttttgttagggaaattcctccaaggactcttttaccctcactctctgcctaaataatttctttctatctcctttatcaatatggctgagtctggggctgttatgggctcagaatgggggagggacagaccataggtattattcaaaaaggcaacattcgattggctaaaaggcatttttcaaaaaaaaaaaaatctgttgggaaagggcaagtaaacaagaacagaagttttcactctgggtcgcaggtttcatccaggacgagtagtccagtctttcagcctatagactgtttttggcttgaaggtggggttttaccggggacccaccccatctgcctgggtatttggctgtctcctgtcactatcacagagataacaagaacacaacaaagtaaagaaccacgacattcaaatggataatttttgaggaagccatgtcagtgcatgacatgaaaatgatttaaatgatgctttagaaatctcaagaacagctgaaagtaaactgatcaaagacagagatttgatgaccatgtacagagaagaaaactataaaagtaattaatcactgaaggagttgttgaatagaaatatacaaaaacatataaagcaattttataggtgctttaggaatgggaaacagaggcatgtcttttagagagagaaaaaaagagccagaatatttaaattcacatttgccttaggtagttgtaatatccaggaaacaggaggatgttccatctaacatcactgggattacaggcgtgagccaccgcatctaagaaatattactaatcatatcacagagtgtacacacaatgtgtacacttactgtgttgttagcagtaatagcgaagagatattatgagtcatgtcacagggtgtacatccactgtgatattaacattaatattgaagagatattatgaatcatataacagggtgtacaaccagtgttatattagcagtaatatcgaagagatgttatgaatcatatcacacggtgtacacccactgtgatattagcagtaaaatcgaagagatattttgaatcatatcacatggtgtatacccattgtgatattagcagtattatcaaagagatattatgaatcatatcctaggtgtacacccactgtgatattagcagtaatttctaagagatattattaattatatcacagggtgtacacccattctgatatttgcagtaatatcaaagagatattatttgcagtaatatcaaagagatattatttgcagtaatattgaagagatattatgaataatatcccagcatgtacacacagggtgtgtacagattaagaactgcagcccatcctctttgggctgttcctgtccatgtgcctggtcatggtgctggggaaccttctcatcatcctggccgtcagctctgactcccacctccacacccccacgtactttttcctctccaacctgtccttggctgacatcggtttcccctccaccactgtccccaagatgattgtggacatccagtctcacagcagagtcatctcctatgcgggctgcctgactcagatatctctttttgctgtttttggatgcatggaagacatgcttctgagtgtgatggcttatgaccggtttgtggccatctgtcaccctctggattatccagtcatcatgaacccatgtttctgtggcttcctggttttgttgtcttttttttctcagtcttttagacttccagctgcacaattggattgccttacaaattacctgcttcaaggatgtggaaattcccagtttcttctgtgacccttctcaactcccccaccttgcctgttgtgacaccttcaccaacaacatagtcatgtatttccttgctgccatacttggttttcttcccatctcggggatcttttctcttactataaaattgtttcctccattctgaaggtttcatcatcaggtgggaagtataaagccttctccacctgtggctctcacctgtcagttgtttgcttattttatggaacagcccttggagggtacctcagttcagacatgtcctcttatcccagaaagggtgcagtggcttcagtgatgtacacagtggtcgcccccatgctgaacccgttcatctacagcctgagaaaaagggacattaaaagtgccctgcagcagctgcatggcagaatagtctaatctcatgatcttattatcggttccattctttagcatgggttggaaaaggcagcaaggtcaaatatctagacctgcaaagaatatcgcttccttcgttatgtctctagttggaattgctgagtattctgatatcctttgttcttaataaacatcatgattgaattcaatatacctagacggactcttttagtttctgggcaatgaccctggtatccaggtgaaattacattctacttctttcttctttcttctcttcttctccttctccttctccttgttcttcttcttcttctttttcttcttcttttttgagatggattctcgctcttttgcccaggctggagtgcagtggtgtgatctcagttcactacaacctctgcctcccgggttcaagcaattctcctgcctcagcctcctgagtagctgggactacaggcacccaccaccatgcttggctaatttttgcagttttagtagagacggggtttcaccatgttggctaggctggtctcaaactcctgaccttgtgatccacctgcctcagcctcccaaagtgctgggattacaggcgtgagccaccgcacctggccacatctctcttcttgtatacagttaagtcctcacataatgttgataggttcttggaaactgtgactttaagaaaatgaattataggaggtcctcaaataatgtcatttcctttaacattgtttagctataaagttgttgagaaaaagaatctggtttcattatacatcatttttcttattgttgcagtttccaaaaatctattgaagaccttaaatgagaatttactgtacttcacatttatattgcttttcactgttcatttgtaatttatttacactttgcatctataaaatctatttaggcagattatatgtgaggatccatgtcactggtcctcaagtttgagttagattgaaattgcccagagagcttacaagtgctgatgcctgggtctcattaccagagattctgatttacttagacttgtgtgggtatgaggatattacaaacatcagagagagttcagatggtaaagttcccaaagggattaaactcaatgtaagttacaaaggagttttttgtaccaccaggcaatgtgatttcttcaaatgcattgccttcaacactgaaccgactgtcattatgctgggttattttcaccccttagaatttttattttatctactgcaactgtagttttacatgtatatagatttttatcatatttccttcttgtgcatacataaaaagagaaataggaaataataacatggtaacaatatccctagacttcccattcagagactggttctttaaaaatacgtgttatttttactttctaataaagaaaatgtggtgtatgcatatacaatgagatatgattcagctgtaaaacaaatggcatcttgtcatttgcaacaactttgatgggactgtaggtcattacgttaagtgaaatagggaaggcacaaaaatgcatgttctcattcatacgtaggagctgaaaagttaatctcatgaaggcagacagtagaatattggctaccagagcatggtaaaaatggggagggggttgaagagaagttggtatatgggtccaaaggtccatgcagaagaattaaattcgagtatttaatagtacagtagagaaattttagttaacaataatgtggaatatttcaaaatagcaaggagatacgatttgtgtggttcttattatgttggtctttaacctatagtatttctgttctgatgtcattcttctgtactcatcttttgccaggttgggactctcgaaaccctgttctatttcccatgtgggttttttgtttttgttgttgtttgtttgtttttgagacggagtcccactctgttgcccaggctggagtgcagtggcatgatctcagctcactgcaacctctgtcacccgagtttaagcaattctcctgcctcggcctcccaagtagctgggataacaggcacaggctaccatgcccagctaatttttgtatttttgtagaaatggggtttaaccatgttggccaggctgatctcaaactcctgacctcaagccaaccacccaccatggcctcccaaagtgttgggattgcaggcgtgagccaccgtacccagcccatgtagttttcttatgtaattccactcctggtcactaaggctcatcacactgaaagttcagtgtacttcactaacaccttcactccccgaagcctcagagtttagaggctaccttcagttactgtttctgttactacattgtttccttttgcctttgtcctgcagtaacaattgaaccaactccctatattcaattctcttcattaaaataactagattgacttctattcctgaactttgatttgggaacaaaggtatgttgtagttctctacaattggaatatttttaaatgtgctcaagaaataaagctggttataaaacacatgtctttgtgaagggcatctaactgaggtttaaatgctggttttctacttccagttgctatgtggctctactgatgtctgaggattattgaaccaccaatttcatcataaataatttaatcatgttcttctataactttatcctaagatattaaatgtatatgtcaccaataaaagtgagctcttcatttgtcacccaatagtcaacgaacatgataagtggtacattaatattgcctgttgaaatcacattgtagacgctccccataggtgatgctctgtcctttgctctttatgtcaagatttagaagagagctatgatgaactaataccttacatggcagaagtttggatgcttcagaatagccatctaagattactatgacaatctttgatttggacggaaattacagataatggaaaaaaatgtcagatttgtagctacttcatcagccatatattggctcttgaatttgggacctttggcagctcacagctcttttctgaacctcagattcctcagtagcaaattaagtacaatcattttttttccttccaagatcatgcaatgatcatatataatggtatcatgaaccagtaaaggtagttttccatcaaatatttttagtatatattattagtatatattattacataaaagaagtcaattttatgaaaatttccagaattcataagcaaattgttattgcagaattcataagcaaactgttattgcaaactgtgtaaccttgtatgcaatacaaaacatatttctattacactagttcacctaatactgtgataatggtctatctgagaggctggctggggagatataatgaaatatatctctaattagataactatttaataggtagtaatggaacaataaggccaaactgtcataatcaatgtattattgattagtgtattgttgaacatgtgttttattttttgttttatttttgagacggagtctcgctttgtcgcccaggctggagtgcagtggcacgatcttggctcactgcaagctccgcctcccaggttcacgccattctcttgcctcagcctcccgagtagctgggactacaggcgcccaccaccgcacctggctaattttttgcatttttagtagagacagggtttcaccatgttagccaggatggtctcgatctcctgaccttgtgatctgcccacctcggcctcccaaagtgctgggattacaggcgtgagccactgcgcctggcccaacatatgggttttaagggttgaagtttgattttcaacattagctcatctaagtcatttgctgactggaccagaacatatttattagctccacatcctctaattcatcatttttaatgatgttcagcttgaggaactctaggattaaacagataatgtatttacctgataagaaattagtaaatgtagatatcattgtcatcatctacacttagatcaatgcatttcaagtaaattatttgaactcctgttgttcattatcctggatggctgacggactgtctcttttttatatttacacaagggcagagaatgaatatcattatctatatactcacaaccttgcacagtgaggacagctctccttcatataacaatgaagtaattgtacactgacttatgagagtgaaggcaatttgatatctgttcaaaccatattttctttcctcactgaagccctattcctcttatacagagaactccttggaaacaaaacgtatggtttgttagtgtttgatcagaaccgttgaatgggatctagatttcttaaacagtatttacagataaagaatcacataagacttggaaccaacccaaatgtccatcaatgatagactggattaagaaaatgtggcacatatacagcatggtactatgcagccataaaaaaggatgagttcatgtcctttgtagggacatggatgaagctggaaaccatcattctcagcaaactatcgcaagaacaaaaaaccaaacaccgcatgttctcactcataggtgggaattgaacaatgagaacacttggacacaggaaggggaaaatcacacaccggggcctgttgtggggtggggggaggggaagggatagcattaggagatgtacctaatgtaaatgatgagttaacgggtgcagcacaccaacatggcacgtgtatacatatgtaacaaacctgaacgttgtgtacatgtaccctagaatttaaagtataaaaaaaaaatcacataagaaaagaaaggttttgaaagattctgcaaataatgaaggttaatacattaaaaagtgatggtagacattcttcagttgcacattaaaaaaaaactcagaaaatagtatcctcctgtttccattaagtggactcttcatgtgaggggaaattaggaaaagatgaaagaaaatgattcattctactgcacaaacataactcttttttttttttttttttaagatagagtctcactctgtcgcctatgttggagtgcactggtgcaatcttggctcactgcaacctccgcctcccaggttcaagagattctcctgcctcagcctcctgagtagctgggactacaggtgcgcaccaccacgcctggctaatttgtgtatttttagtagagacagggtttcaccatattggccaggctggtgtcgaactcctgacctcatgatctgcccacctcagacttccaaagtgctgggattacaggcctgagccactgcgcccagccaactctttggtttttatacaaaagtacataccttgaagacattatcatcactgaagtaaataaatcacagaaggataaacacaactgggctcagtggctcacaccagtaatcccagcactttgggaggctgaggcaggcggatcacttgaggtcaagggtttgagaccagcccggcgaacatggcgaaagctcgtctctactaaaaatacaaaaattagccagatatggtggcacatgcctgtaatcccagctacttgggagaatgagacaggagaattgcttgaacttgggaggcagaggttgcaatgagccaagatcacgccactgcactccagcctgagtgacagaatgagactctgtctcaaaaaaagataaacacagtatgattccactgatatcaaatatctagagtagttaaactcatagagttggaaaacagaatggtggccccaaggagtgggcgagagagaggaatggagagtttgttgaatgggcacagtttccattttgaaagataaaaatgttctggagatgatggtggtgatggttgctaaacaatacaaatgtacttaatgtcattaaactgtaaacttaaaaatagtggaaattgtttatattgacccttctatataaaataatatatatttatactttttaatatttacacatggtatattttaccacaataaaagatgaaaattgaagcatttggatctttacaaagaaaagaaaaaagtgaataatacacacaagctttctcctgattagaggaagagcccaaaagcttctatggacactcatttttctcttcttcttcctgaattattatgaggaagtccttagagattggggaacttgggccaatttggctaatgaggagctctgtgccttgagcccccaaggccatagcatagtgaatactcagcctgtgcctccagccctgcagtgtgagcttccagtccagtgggctccacacctgtcgtctgcatcaggaggctcatgtctgaccctgtcttcctgccagtcctgaggacggagcctgagcctccatcgtgcaccacgcagggaggacagcggacctgctctccatgatcatggcccagcagaggggaagcgcagctcagtgagtgctgagggatggtcgggagccttctttcctcatcctcaggacaaacaggacagtggagtggcagataggaggacatcaatgtgcaaaatatcagctcagacaactgtggagtttatgttcttgattgtggtggggactctgaaatctcactcaaagttttactttctccctccactggttctacttgctatagacatctcactgaagctaggaaaaaataggtctctctaagctattccatgaacactgtaaaaggattatgaagctgatgatgaggatgaggaggaagaggacagtcactatgacatcatgaacttttcctgagggcttcctgaatgccaggcgcccagttctgtgttctatgtggtttgtttcattttatctgcatagccttctgcaatccataagtgcacacattattattattttgcacgaggaaaggagctgtgcatttttatgtaacttgtagtatttcatgaagtagagaggagtaaagccatgtttgaatcaggccatctaaatccttgcacatggcatttggctaggcctcttcctgcatccaacctgccctctcgaatccctgtcactctggacccctggtgtgctcactgcttaccagtgggttcctggtagaccacagctagaccagtgggtgctacgttcactgtatcaagtatagaaagggcagctgagatcacatcaaagatcccagaaagaactggcacaggatccttcagggtgcatctctcccttgcccctgttcctggctttccttgcagctctccacctcctgaaaggagaaataaaatcagagttttggcctcattcctactcaggaatctggaaacagtttgaaaatgcacctccgatgtgcctgtggttaagacctcttacctctgcttacaactttctgatagctgggaaacataaaaaaggttcatgcctgagactcagagactgatcatttattaggttggtgacaacagtaatggcaaaaacctcaattacttttgcatcaacctataatttttttaaaatcctgttattccacttatctgtgtggcagggggcaagatgttagtgtttctgagactcaacattgccacctgagttgatttctagttgacacagatacattcagtattgattaagcagatcatgggggctccctgtgggatctatttgtgatggatgcataaagtaaaggcaacgtgtattctagaaattgttattaatattttaagattaatctttatatcactcaactgaaatatcctgtgacctgaagttactgtttctgtacttcccacaggacattttatttttgtccttatataattaagtactgattattgtgacagaaacaactgagtctctttcatctctaattctccagagtctctaacctgcttgacacagaggaggcatcagaaataaaaatctcttttaagagaaatgcaggtcaggcgcattggctcatgcctgtaatcccagcactttgggaggctgaggcgggtggatcacttgaggtcaggagtttgagaccagcctggccaacatggtgaaaccccatctctactgaaaatacaaaaattagctgggcatggtggtgggcacctgtaatcccagctactcaggaggctgaggcaggagaatcacttgaacctgggagacagaggttgcagtgaactgagatcgtgcctctgcactccagcctgggtgacagagcaagactccatctcaaaaaaaaaaaaagagagagagagaaatgcaaatcgaaactacaaggagatatcatctcaccccatttagaatggcttttatcaaaaagtcaggcaatagcaaatgctcacaaggatgtggagaaaggggaacaattgcacactgttggtgggaatgcaagttagtccatccattatggagaacgagttggagtttcctcaaaatactacaaatagagctaccataagatgcagcaattccgggccaggtgcggtggctcatgcctgtattctcagcactttaggaggccaaggcgggtggatcacgaggtcaggagatcgagaccatcctggctaacatggtgaaaccctgtctctactaaaaatacaaaaaattagccgagcgtggtggcgggcgccggtagtcccagctactcggaaggctgaggaaggagaatcgcttgacctgggaggcggaggttgcagtgagccaaggtcgcgccactgcactctagcctaggcgacagagcgagattccatctcaaaacaaacaaacaaacaaaagatacagcaattccattgctaagtatatacccccccataagggaatccatatattgaagagatatctgcactcccatgtttattacagcactagtcacaatagccatgatttggaagcagctaagcattcaccatccattcaacatatgaatggacaaagaaattgtgtacatgtgcacaatagagcattatgcagccataaaaaaggaagagatcctgtcatttgcaacaacttggatggaactgggggccatcaatttaaatgaaataagccaggcacagaaagataagcttcacgcgttctcacttatttgtgggatctaaaaattaaaacaatggaaatcatggagatagagagtagaaggatgattaccagaggctgggaaggggagtgggggtgaggggaaaagtgcaggatggttaagcaacacaaaagtatagttagagacaatgaatgagatctagtattaggtgactgtaatcaacaataatttattgtacattttaaaatagctaagagtaattggattgtttggcacaaggaaaggataaatgcatgaggtgatggataccccatttaccctgatgcgattattgtaccttgtatgcctgtgtcaaaatatctcatgtcattcataaatatatacacctgctatgtacccataatattttttaaaaagaaaatgatgtataattatgtgtgtaaatgtggatataactctacagaaatactgaatgaaaaagcaagttacagagtaatacctgctctatactttcgttgacataaaatttaagaaagcaaaattaaatgattcattacttagggatatatatatatatgagtagagtataaagaaagaagagattaactcaaatttcacattggaggttacctgtgccgtagggctggggtgcctggaaccatagaaggatgcacggcttcgaagattgtgctttttttttcttgtttgtttgttttgttttgtttttgtttgtttgttttttgaaagtgagtcttgctctgtcacccaggctggagtgcagtggtgcaatcttggctcactccaacctctgcctcctgagttcaaatgattctcataccttaccctcccaagtaggtgagattacaggtgtgtgccaccacgcccggctaatctttgtatttttagtagaggcggggtttcaccatgttagccaggctggtctcgaactcctgacctcaagtgatcagcccacctcggcctcccaaaatgctgggattacaggcatgagccatcgagcctggcccaaagattgttttttgttttgttttgttttttgagatggagtctcgctgtgtcacccaggctggagtggcacgatcttggctcactgcagcctccgcctcccaggttcaagtgattctcttgcctcagcctcccgggtagctggcattacaggcaggccctactgcgcctggctagtttttgtattagagacgaagtttcaccgtgtttgtcaggctggactcaaactcctgacctcaagtgatcctgagcctcagcctcctaaagtccttcgattacaggcatgagccaccacgcccggcccaaagattggttttattgcatttgttaaactgtgggataggtacttgggtatttcattattgttcttttttttttttaagtacatacatattatgtacattcccttgatttcttggaacatttcacaaaaaaattatatacacagaataaaataaatatttaaagccaaaaatctctggaaatactgagaaaaaaagagagaaagagacagaaagaagaggggaaggtaaacattattgcttagacagaaacacattttagactttcacatctttctagcctcacataaagtaatgcaaaagtgttcttaaaattgcattactcacgcctgtaatcccagaattttgggaggccgaggcgggcagatcatgaggtcaggagttcgagatcagcctgaccaacatgaaaccccgtctctactaaaaacacaaaaaattagccgggcatggtggcacccgcctgtaatcccaactactcaggaggctgaggcaagagaatctcttgagtctaggaggcggaggttgcagtgaaccaagattacgccactgcactctagcctgggcgacagagcaagactctatctcaagaaaaaaaacacttttattaatgctcaaacatccacaggtgccttgcgcactacagacaacttgtagtcactgatggctttgattatgcgcatttaactaaaccttatttatcaaaactctgagtccacctaagcaaggacaggagttgaatattaaatgaatttcaaaagaaaacccacatatttgagggagactttgcttccacaggaaagtgaagtcagaaaccatgaagacaatgaaaacactagaacagaactggaatgtgaaaatgtctgcttatgaactgtcaactttaatttatctttgaaataacgtggtcctaggtcttacagaatatttctaaatattgtaaatcaaaggaatttgtagcattgaattagaatgaaataaggcatatttgaatgtctttggtttcttttaattacaaagatttcttttcttaaatggggaaagatatttctttactttttgtgtgtgtgtgtaagacaaggtctcactctgtcatccagactggagtgcaatggtgtgaacttggctcactgtaacctccacctctgggctcaagtgatcctcccacctcagcctcccaagtagttgagaccataggcacatgccaccacgccagctaatttttgtatttttagtagagacggggttttgccatgttgtccaggctggtctcaaactcctcagcttaagtgatcctcccgccttggcttcccaaagtgctgggatgacaggcatgagccactgcgcctagccaatatttcttattttatatttttactgaaaagagtacgctgtattttaatgtgatcatgaattttctcaaatgttcttgctcttctcactttgttcagtcaagggtctctaaggtaagtgtctacagaatcaggtgactaacacaccaatcaattacaaaaggacttgtagcaaattgggttttacggacacaaagatgggaaaaacagtggggactgcttgatgggggagggtgggggtttatggggtggaagtctatctatccagtactaagcccactaccttggtgttgggatcattgctgcaccaaacctttaccgacacattatttactcatgtaacaagcctgcatatgtattctgtgagtctaaaataaaaaaaaagaaaattagggttttcaaaactgagaaatatggctgagggtatatgatcctcaaatgtgaaaacattaattgtaaattgcttgtatccaaaatatagacacagtgctgggtgctgattttgtcctttccttttttccaattctctttttctcaattgtgtccaagatacacagagccagagaatctcacaggtgtcttagaattcctgctcctgggactcccagatgatccagaactgcagcccgtcctctttgggctgttcctgtccatgtacctggtcatggtgctggggaacctgctcatcattctggccgtcagctctgactcccatctccacagccccatgtacttcttcctctccaacctgtccttggctgacatcggttttgcctctactactgtccccaagatgattgtggacatccaggctcatagtagactcatctcttacgtgggctgcctgactcagatgtcttttttgatctttttcgcatgtatggaaagtctgctcctgattgtgatggcctatgaccggttcgtggccatctgtcaccccctgcactaccaagtcatcatgagcccacgactctgtggcttcttagttttggtgtctttttttcttagccttttggactctcagctgcacaatttgattgtgttacaacttacctgcttcaacgatgtggaaatctctaatttttttctgtgacccttcttaacttctcaagctggcctgttctgacacctccattaataacatggttgtatattttattggtgccatatttggttttctccctctcttagggatccttttctcttactataaaattgtttcctccattctgagagttctctcttcaggtgggaagtataaagccttctccacctgcagctctcacctgtcagttgtttgcttactttatggaacagcccttggagggtacctcagttcagctgtgtccctttcctccaggaagggtgcagtggcctcagtaatgtacatggtggtcacccccatgctgaaccccttcatctacagcctgagaaacagggacattcaaagtgccctgcagaggctgcacggcagaataatgtaatctccttatctgttgcatcttttttgtagtattggttggaaaaggcagagctttgatacaaaatatcaagacctttaaatccttcccccttggttacattatatttattgcttgataggttcaattcctctccatgtttcatatgtgaatgtgggcggcaagccaccaggggccgaggcaagagaccgagggcacgagctgttccagcataataaagaaaatatataaaataagaatagttatactagatatagatcatagatatgattatatatgaacatcattaatcattagtttgtagcaattactctttagtccaatattaatcttcactctacaatcataacctaggaaaaaccaggccatacagagataggagctaaagggacatggtgagaactgaccagaagacaagtgtgagccctctgttatgcccggacagggccactagagggctccatggtctagcggtaacgccagtgcctgggaaggagccccgttaccttgcggatcttggtctagcagtagggtcagtgcctagaaaaagcactccttactcagctgaccgggaaaaggagtctctcttttcccgggggagtttagagaagactctactcctccacctcttgtggagggtctgacatcagtcaggcctgcctgcagttatgcggaggcctgtttccctgtgatgctgtgcttcagcggtcacgctcctgtttcacttttatgttccaccctgtacaactggctctgccttctagacagcagtagcagaattagtgaaagtactaaaagtctccgaaatgcagaaataatggtgtaagctgtcctctctctctccgcctcggctgccaaacagggaagggccccctgtccagtggacacgtgacttgtgtgaccttacctatcattggagatggctcacactccttaccctgcccccttgtcttgtatccgaaaaataacagtgcagccaggcatttgggccactaccggtctccgcgccttggtggtggtggtccccccgggcccagctgtcttttcttctctttgtcttgtgtctttatttctacaatctcttgtctccacacacggggagaaagacccacagaccctgtagggctggtccctacatgtgaatattgtttccattgttttgtctttaattggaatgtgaaggtattctggaattctttgtttattgcaaaaattcgtggctgaatccagtatacctggacagcctcctttagtttccgagcaatgaccctggtatctaggtgaaatcacaaccctgtttttatatataagaagtccttgcttaaagtcaatagcatcttggaaactgcaaccttaaggaaatgatatacagcaggtcctcaagtaaaattgttttgttcaaagtccattagttatattgttgataaggaaaaacacacggtttcattataaatcatttcacttaaatcacagtttccaaaaacatattgagggtgttaattgaggacttactgtatttcaaatttaagttaattttcacagttcgtgtggaaattatttacatattacatctgtaaaatcactttaagcaggctatgtgtgacgaacttgttcacgagccctcaaccttggcttttattgacctcacctggggagcttacaaatgatgatggctgggctctcttacccagagattttgatttacttgaacctgtgtgggtctgagaggttttaaaagcaccagtgatagttcagacgatgaagttcttcaagggatcaagctcaaatgggtaagctactaaagagctgattgcagcactagacaatgtaattttcttcaactgtcttcttcaaattcattatccttcagcaatatacagattgtcattatgctgggaatttttagtaagcacttggaatttgttgaaaatgttgatttatatacgtatagattttcttcggatttcactcttgtgcgtactgaaagggaaaatagaaaaggataacatggtaacaacatccctaaaacttcacatgctataactgatttttaaaaatttgtttagttttctttctttttttatgaagtgtggggtaggtacacaaagttatactattcagcctttaagaaatgaaagtgagtcatttgcagcaacatggatttaagtgaaataagccaggcatgaaaagacaaatatggcatgttcccactcatacctatgagctaaaacagtgaatcttgtgaaggtacaaggtagaatggtaattactagaggctggtaagggaaggaaggagtggagcatgaaaagatgtttacagggtacaaaaatgcagttagatagaagaaataagttccagcgtttcctaatacagtaggggaattctagttagtggtaattgattgcatatttcaaagtagctaggagagaagatttgtattgttctcattattctggtttctaagccattgtctttctgttcccttcccgcctttctctactcagctctttcatgctaggttggggctcttgaagttattgctctgttttccatctggtgttcttgttacagactttcatgaacactgaattttactacactgaaattcggtatactttgcgaccaccttctagtatacccctatgcctgcctcagtgtttagaggctgctgccttcagttactgtctctgttaccacattgtgtcctttagcctttgtcctgcagtaacaatcaagccaactccctctgttcaattctcttcataataagtagattagttattcaaaataactagattagtttctatttttttttttttttgagatggagtctccctctgtcacccaggctggagtgcggtggcatgatcccgactcactgcaacctccacctcccaggttcaagcaattctcctgactcagcctcccgcgtagctaggattacaaggaccgcccaccacgcctagctaatttttgtaattttagtggagacggggttttgccatgttggccaggctcgtctggaacttccgacctcaggtgatccacctgcctcggcctcccaaagtgctgggattacaggcatgagccgcgtgcccagccctggtttctattcctgacctaaccttgactgaggaacaaaagtatgttggagttgtctgcaaggggaatattttaaaaatgtgctgatgaaataaagctgcttttaaaacatatgtctttgtgaagagagtccaactgaagtttaagtggcagtgccctatttccggttgctgtgtgactctagtgatgtctagggattgttaaatcaccagtttcatcataaataatttcagggttttcttcttttactttacactgagctaccaaaagtccatgtcaccagcaaacatgaactctcctttatttcacataaatgatagtcaaagaatttgataagtgggacattaatgctgcctttttttttttttttttttgagacagagtcttgctctgttgcccaggctggaatgcaatggcatgatcttggttcactgcaacctccgcctcctgggctcaagtgattctcctgcctcagcctcccaagtagctgggactacaggcacacaccaccatgctcagctaatttttgtatttttagtagagatggggttttgccatgttgtccaggctggtctcgaactcctgacctcaagtgagccacccacctcggcctcccaaagtgctaggactacaggcgtgaggcactgtgcctggcctaatgctgctttttgatgtcacatggtggactctccccactggtaatgctttgttgttggcacttttattttaatatttagaagagtgctatgatggattaataccttgtgatgggaaatgtttggattgtttggatggttcacagtagccaaccaaaagcgatgtgacaaacttcaatcgggatagaatatacagatggtagaaaaaatgtgggatttatggacccttcatcactcatatattgggctcttaaacgtgggacttttgataactcagaggtcctttctgaaccccatgttcctcagcagcaaattaattgcagtagtcttttcttccaaggccatgcaatgattttatatcatggtgccattaaccagtcaaatgttagtttcccttgaaatgatagcccctattattacattgaggaagttaattttagggcctggcatggtggctcatacctgtaatcccagcactttgggaggctgatttggcaggaaagtttaaggcaggtgtttgagaccagacttggctacatagtgagaccctgtcactacatttttaaaaaatttaaaagaagttaattttaaatgggtattctcagaatatacaagtaactggatattacaaactgtgaccttgagtataaaacaaaacatttctttttttttttttttttaaagacagagtctcgctctgttgcccaggctggagtgcagtggcacaatctcatctcactgcaacctctgcctcccgggttcaagcaattctcctgcctcagcctcttgggtagctgggactgcaggtgtgtgccaccatgcccagctaatttttgcatttttattagagacagggtttcatcatattggtcaggctaatctcgaactcttgaccttgtgatccgcctgcctcagtctcccaaagtgctgggattacaggcgtgagccaccacacccaggtaaaacaaaacatatttctattgaacaagttcatctgtagagatgtgataacaactaagagtctgtttgaggagacatatcaaatgtactgattagaacactatttttgctactacccaaacattttaaaagctcccaactcccagcatcttccgatccaatctacctctacattcctgtcattttatcatttgtgccctcatatttacctcagtatttattgatacactgataaatagcatcctttcttccacattcaacttgttggaatatatatttacatttattatatcagtcattgacaaatattgttgagtacctcacctctgagccatgggtggaatgtgaaagtttataaagaaccataatatctggctgggcatggtggtctgtacctacaatctcaccactttgggaggctgaagcaggagggtcacttgagaccagaagttcaagaccagcctgggcaacatagcaagactccatctctacaaaaaaataaaataaaataaattacctggacatggtggcgcaggaggattacttgaggccaggaattcaaggctgcagtgagctatgactgagccgcttcactgcagcttgggcaacagagcaagacatctcaaaacaaaacaaaacaaaaactccataacttccatacaacctattttatctacttgaataaagacaggccaaaagaaagtacatttcattaaagaatttactaggtgatctcacacacacacacacacacacaacacacacaacacagagtctacactagggagttctccgcctgaagtgagatgagctctttcttgatgagcaacaatcagaagctgctgggaacacttgctgaatttaggtgcagaattgcagcagcttattgtgatgttgggctgagagcttgtggcgaaggagaaccagggtggcttattttgtctgaaggtccaggagaacattgttaagtctgtagaaatatccagtgcagaggaaagggcgacatgtccatgtgccagttctacagcatggaatttttctgacagtacaatgtcttgaatggtgaggaactctaccggaaggcagagggaaatctccatggtcttgggtgcttagagacccatgtcctggtagaaggataggcctggcctctgttgctctgtcccttgcttccctgcactgacagaactcagctggcatatgtgagctgccccatgagagtcccttgtggcaacaaactgaggggccttaggccattgtcctgcaagaacctaaaccctacaaacagccatgtgagtgagcttcacagcagatcctctccagtcagtccacgagatgactgcaaccctggctgacatctgattgcagtcttgttagatatggggaaatgcttaagcaatatataaagttaccaagttaggctgcaaagatcagcagtttctaacatgccaacatagatcaatcagacagaaagaattagggtcttatccaacttagcaaaaacataaattaccaatgcataaaatctcaaattacaggcaaggagtatagaaagtaaaatagaaagtcctccttagaaacataaatctgaacttcaagaatgaaagtagtggctgggtgtggtgggtcatgcctgtaatcccagcactttgggaggccgaggcgggtggatcacgaggtcaggagtttgagaccagcctggccagcatggtgaaaccccatctctactaaaaatacaaaagattagccgggcatggtggcgtgcgcctgtaatcccagcgccactgtgctctagcctgggcgacagagcaagactccatctcaaaaaaaaaaaaaaaaaaaaaaaggtgcaacatattcttctcatggaaggcctgcttcttctttatttacatggttcattcaatggatttgcagatatgactcccatttcattttaaaattaaaaaaaaatctgatgtggtttgtcactgtctctgaaacttggtggtgggaactcagaggacagaagaggttttaatgagaagaggaagccctgttccttcaatggtcattcacttttctcctcttctacttttatttttctttaaaaatgttttaaaacatttttaatttttgtgcgtagatagtagctgtatatatttatggggtagatgaaacgttttgatacaggaatgcaatgtgaaataaccacatcgtggagaatgaggtattcatccctcaactatttatctttagagttacaaacaatgcaattatactttctaagttattttgttttatttatttattttgttttatgttttagacagagtcttgctctgtcgcccaggctggagtgcagtggcacaatctcagctcactgcaacctctgccacctgagttttatttcaaagacaaatatttattgcaggtatttgaataaacagaaaatactggctaccaaatttgcaggatgcaaattaggattagtatgcattccaaatcagtgaaaaatgataatatcttttgataccatcaaaatgataatatctttatgatatagaatacaatggcccggaaatcaagagttggaacaagattggccctgcctaacatcacctgtagtgagacacctaaggggtttgtgctcccagattccacggctctgatttctgtgggcttatagggcttgtatttcaaagggatagcatgtcagactcattctggccagtatattactaggaaccatttgacccaaccagctttcaaatatagagtcataatttgaagttgaaaatcacattatcattctttgcttttgtgtttgtttttggtttgagacagggtcttgctctgtcacccaggctggattgcagtgccacgatcacagctcactacagcctcaaactcctaggctccagtgattctcctgcctcagccctccaagtagctgggaagacaggtgtgagccactgtgccccgaaaattttatatcactgtttttatggaaagtaggatggcaaagttagaagtgtgggcaaagtgtcagattgttaggatatactctacctccatctcagtctcctcctttgagaaatgcagtgaatgagacaaaatttctcacgaaatgttttcaggattgaataacatcagacatgtaaagcaacaagcactgtcctgatattgtaaacattttatacgactaatctatggttttcattttatttcctatccagaggacaagaaaaaactatactaaggtgaggaacatcaacattcaacaggataatttttgaggaaaccaggtcagcacttgatattgggagtgccatacacatcaaattagaagtctcagaaagagtggtaagaaaactgatcaaagatggaactttatgggaaacatctagggaagaaaagtcaaaaagggcttacagagggagtttttaggagaaactaacacaaaaacaaaagcaaaatcatagttgtttttgattaaaaaaaaaaagaaaagaaagaaacacattggccaggcacggtggctcacgcttgtaatcctagcactttgggaggctgaggcaggcagatcatgaggtcaggagttccagaccagcctgaacagtatggtggaaccctgtctctactaaaaatacaaaaattagctggctgtggtggcacacacctgtaatctcagctacttgagaggctgaggcaggagaaccgcttcaacctgggaggtagaggttgcagtgagccaagattgcaccactgcactctagcctgggcgacagagccagactctgtctcaaaaacaataacaataacaacaacaaacaacccaataacaacaaccaaaaatcccacatcaagcacattttttaaaagagaaaaagagccggatatttaaacccacaacatttgccttaggggtacgcagtgtgtcctcttagttctgaggccctgatttgtcatggacaagagtcggccctgctgaggagtctttccagggcccccttcacatccttgttcctcaggctgtagatgaaggggttcagcatgggggtgaccatggcgtacatcactgaggcggtggagctgctctgggaagaatgggtcacagcagaactcagatagaccccaagtcctgttccatagaacaaggagaccacacagaggtgagatccacaggtggaaaaggctttgtacttgcccttggtggaggacattcccattaaggaggagacaatctgagagtaggagaagaggatcccagctacaggaaacacacccagcagtgccgtggccacatacaagacaatgttattgaggagggtgttagagcaggccaccttgaggacctgagccggttcacagaagaaatgcggaatctcagtgcctgtggagaaggtcaacctcttcatcagtagaatatgaaccagggagaaccagaaaatgatgaaccaagatgccagaaccaggaggccacagaggcaggggttcatgatgaccgtgtagtgcagtgggtggcagatggccacaaaccggtcataggccatcacggccagtaggaaagtatccattccagcaaacatcattaaaaaatacacctgagtgaggcaccccatgtaggagatgtctttgctccgtgcctggatgctcactagcatcttggggactgtggtggagatgaaacagatgtcaacaaaggacaggttggagaggaagaagtacatgggggtgtggaggtgggagtcagagctgacggccagaatgatgagcaggttccccagcaccgtgaccaggtacatggacaggaacagcccaaagaggacgggctgcagttcaggatcatctgagagtcccaggaggagaaattttgataattctgtaaggttttctgcttccatgtagctgttgtgtctgctggggaaggaggaaaaagcaacgtttaatgaacagcaagtggcagctcagcttgtcatcactttacaatatcaccttttgatggacatttgtcacccttcctggagtccttacaaagacaatgaatctctcaggaagtggtatctatttttattctatttgtgtagagttatccagccattctttaatttttagaaatctctctctttggccgggcatggtggctcacgcctgtaatcccagcactttgggaggacaaggtgggcagatcacgaggtcaagagattgagaccatcctggccaatatggtgaaaccctgtctctactaaaaatacaaaaatcagctgggcgttgtggagtgcacctgtaatcccagttactaaggaggctgaggcaggagaatcgcttgaacccaggaggcggaggttgcagtgagccaagatcatggcactgcactccagcctggtgacaaagtgagactccgtctcaaaaaaaaaaaaaaaaaaaaaaaacctctttttttcatttactcaccagttttaattcccccatttgtatctatgaacttaaatcaatttcttctttggtgtgaatcttccaaaataattaaaggtatgtcatgtcttttcctcgataatccccatgcttccttcattctaatagatgtacaatagttattaagttgtggattttcaacccaaacaacctttattctgtgacccagtgcttggaagtgatgtgacagttaactctcagggctttcttccttccttaaaattaaattattgatattactttcttattgaggtttaaaaatgccatatgcacggtaggaatatcaacaaatgatagctatcattactgctactattactattaatcttattaatcttttccttttatgataattacttagatatataactcttccaaggtatagcatagagctgtgatttggaaaatattttctgaaatcagactttttagaataaaattctgatccatgcattagtctgttttcactctgctgataaagacatacctgagactgggcaatttacaacagaaagatgtttaatggacttacagttccacgtggctggggaagccttataatcacggtggaaggcaaggaggagcaagtcacatcttacatggatggtggcaggcaaagagagaaagcttgtgcaaggaaactcccccttatagaaccataagatctcatgagacttactcactatctcaagaacagcatgggaaagacctgtctccatgattcaatttcctcccactgggtccctcccattacacatgggaattcaagatgagatctgccaccccctgcaccccacagtcatcatgaactcctgcctctgtggcctccttgttctggcatcttgatttatcattttctgggtctccctggttcatgttcttctgatgaagaggttgaccttctctataggcactgaaattccacatttcttctgtgacctgcctctggttcactgtgtagggacacagccaaactatgtgaatccaccaacttactactgtataccatagagaaagttatttgaactgtcttagctgcagctacctcacctccatagtaggagtagtaaatactccctatgtgggaatattgaagagtgaaattaaatgagattatccatgtcatttgtctactatgatttctgtgtcatacaatggatatttcacacatatgaacttttgttcttttgcttttttttttgagacagagtctcactctgttgaccaggctggagtgcagtggtgcaatgttggctcactgcaacctctgcctcctgggttcaagtgattcttgtgcctcagcctcccaagtagctgggaccacaggcatgcaccaccatgcccagctaatttttctatttttagtagagatggggtttcaccatgttggccaggttggttttgaactcctgggctcaagtgatccacccaccttggcctcccaatgtgctgagattacaggcatgagccactgtgcccagcctgaacttttgtttttaacattacaataaatctgtctttcatggctatcatttatcaatatcaatatcccccttacatggggcagccatcaaggatggaattctgatcactgtgaatacaacaggtctgttacgtcttgtgaccaccacacaggactctcaactcatgaagatccctatgcttccctgcttcagagaatgtctgcccagtgtattcctccaagaagtaacaaaagcctgtggactacatacacaagatgagaaaagaaagggacaccgccattagaatcaaagacaaggcctgagagaatgtgtgcttgtgtacacatgcagttgagtgggaatgttggactaatatcagggcaatgaattgccaagaaatgtgactgataagtttgatataaaaatttaaaaatttctataaatcaaatcatcctaaaaaactaaagggcaactttgaggtttgaaaaaaaatttgcatttttcatgatggaaaaaaggttgttactatttatgcctagagaatgttgattaattaaagatggaaaaataatcactgaagaccaactttagtcctggaaagtggatagaagaggcttctctgagataggaaaatttgggctgagagaggaagaatggatcattggtttgtttgtttgtttgtttggagatggaatctcgatctgttgcccaggctggagtatagtggtgctatctctgttcactgcaacctctgcctcccaggttcaagcgattctcctgtctcagcctcctgagtagctgggattacaggtgtgtgccactacgctcagctaatttttttatttttagtagagacagggtttcaccttgttagccaggctggtctcgaactactgacctcaagtgatctgcccacctcggcctcccaaaatgctgggattacagacatgagctactgcacctggccggatcattgttaattaggggaagtaaggaaaggaaagggtaaatcttctaggctgacagaagagaattcgagattgtcccatgggtcattgagcttgtaaaggaagggatttgagatgccagtgagatggggagcagggaatgaaagcgggatatgtatttgatgactagaaatagaacatcctatattcttcctccttgtccctttcacattggtcaacttatatttagttttagacagtggttgcgattgttttgtctcatcatttaacaaggatttacgtggtgcccagcacattactgattctgagcaagtacaaattgaaatgttctataaagactgggaccaaagcatcaactataacacaaaatagaaatcttcaagtttaagacatgtttgaatatagacataaatttaataatacagtaaataacatattcatatctcttttaaaataatgataaatgaagtagtaataccagctctaacaatggaagcaggtttaatgtaagaatgtctgcataattcatcacaaaaacaggtcagtaaagagaaatcataaacaaaatcacaatagaaaaaatgcatttgaaaaagattatcaaccagggcagatcctctcaataaaggaagaaaccaaggacaattgcttaacccgataaacaatggttgttttaataccacaggcaacaagatatgctatgttaaaacagtaaggggtttaaattcctggatacaccaaaggccgtctactacaatttcaatcttttgatattttggtgaacatgcaaatggatttttttttgggggggacatggtgtcactttgtcacctgggctggagtgcggggtgcagtctcagcttactgcaacctctgcctcctgggttcaagcaattatcccatctcagtctcccgagtaactgggattgcaggtgtaagctaaggtgtcaggctttctttttttgttattgtttagtagagacagggttttgccatgttagccaggctggtctcagggtcctggcctcaagtgatctgcccgcctcggcctcccaaagtgctgggattatagatgtgagccactacgttcagccaagggatttttaatatgagaaaaaaaattggactgcatgttgaatgtcagaaataattgtattatttctatatgatatcatggatactaagttgaaatagcaaaaacataacagctagtaagtgctgtaaataagtcaccatctccaccacatcaaccctacccccaatccccagaccactctgggtctggtaaccaataatctgccaggaaaaatatagaatataatagaaaaatccaatcacattaggaacacatagacaataccttgagcatagtagatcttccgtgagtagttaatgaataagtaactggatgtacgaaattcaacaggagactaaagtttataggaaagagtgcaggagagttagagactgttcggaaaataacttattaaagacgggccctggattccaaggagtgagaacagaaggtgggagacactggtttctgtgaaaactaaagtaccatcaaagtacagggacttcaccttcatagactcaataagtatgggactttccaggctcattactgtgaaggctagtacttattctctctcctcttttccttcttaccccaccagccctcactgggtcacactaactctgatggttatcactgaagttttctcttctacacgatctgttcctaggaagccgtactgggttttttccaaaggctgggagcagagaattacaggtgaggttgtttaaacaggggcacattttaagtttccagtgtctcaagagttgaattctcagagcaccttattaaataaattgttctattttcttcccactctccaaagagtttggctccctttgagtagtaagaagatgatagaatggaaatttttcagttaattttgtgatgaaataggcagtggtagggcatgatggatttatttcccccaagaagaaattctttcttcggtttaatttgaaagtcacaagttttgccctaaggaaagattaatttctgcaaggaactaaactcaggaatcatctccaagcgatgtgactcccttgaagagtctttggagattttatggatccctcggtgttgaaaattcatggaaacaaaaatgtcttttctttttaaatattttttcaaattatttttatatatttttttaaattatagaattatatgtatgtatcatgtacaacttgatatttggaaatatatatacattgtggacattcaatgtatctaattaacatacgcattatctcacagagtcgttatcctggtgagaacacttaatatccactctcttagcattttcaaagaatatcatatatatcatcattaactaaagtcatcctgctgtacaatagatctcttgaacttacttctcttatatagctgtaattttgtattcttttactaacatctccacaacaccaacactactcctcaaccccaaaccactctgggtctggtaaccaacattctacttctttgaaatctggattctatttctctgagatcaccttcgttagattccacatatgagtgagatcatgtgatatttgtctttctgtgcctcccttatttcacttaacacaatgttctctgagttcatccatgttgcaaatgacaggatttccttgtgttttatggatgaatcatattccattgtgtatatatactacattttctttatccattcatttatttgcagacaactaggttgattctgtgtcttggctactgtgaataatgctccaataaacatgggagtgcgatatcccttccacacactgacttcgtttcttattgatatatacccagtagtggactgctggatcatatggtagttctatttttaagtttttgaggaacctccatactcttttccataatggttgtactaatttacattcctaccaacagtgtagaagggtttccatttcttcatatcctggccagcacttactatcttttgtctttttagtaatagccatttgagatgaagtgaggtgatatctcattgtggttttcatttgcatttccctgatgattagtgaagttaaaccttttaaaaatgtatgttgggccgggcgcagtggctcacgcctgtaatcccagcactttgggaggcctagacgggcggatcacagggtcaggcgatcgagaccatcctggctaaaggtgaaaccccgtccctactaaaaatacaaaaaattagccgggcgtggtggcgggcgcctgtagtcccagctacttgggaggctgaggcaggagaatgacttcaacccgggagggggagcttgcagtgagccgagatcgcgccactgcactccagcctgggtgacagagcgagactcgtctcaagaaaaaaaaaatgtatgttgtccatctgtgtgtcttcttttgacaaatgtctttcaggtcttttgcccttttttttttttttttttttttttttttgagacggagtctcgctctgtcacccaggctggaatgcagtggcgcgatctccgctcgctgcaagctccgcctcccgggtttacgccattctcctgcctcagcctcccgagtagctgggattacaggcgcctgccacgacgcccggctacttttttgtatttttagtagagacggggttatcaccgtgttagccagggtggtctcgatctcctgaccccgtgatccgctctcctctgcctctcaaagtgctgggattacaggcgtgagccaccgcgccaggctgtcttttgcccattttaaaattgggtcgttttcttcctactgagttgtttgagcttcttacgtattttggatattagccccatatcacatgtctagtttgcaaatattttcctccattctgtagtttgtctcttcactctactgtttcctttgctgtgtggagatttttagtttaatgtaattccatttgtctattgcttttgttgtctgtgcttcagaggtcatatccaaaaaaatcactgctcagaccactatcatgaggttttcctcttttgttattttctagcttttctattttaggttttacatttaagactttaatccattttgaatggattttcgtatatagtgtgaagtaaatacctaatttcattcttctctgcctggatatccagttttcccaacaccatttattaaagagactgtcctttcccccttgtgagtctttggcacctttgttgaaaatcagttggctataaatacatggatttatttctgtggttgatattttgttcagttggtctatgtatctagttttatgccagcaccatgctgttttggatattacagctttgtcaaatagttttaaatcaggtagtgtgatgcctccagctttgttattttggctcacattgctttagctatttggtgtctttagtgattccacaaaaattatttctgtgaaaaatgtttttacaattttgacagggtttgcattaaatctgtagattgctttggatagtatggacattttaatatagcaattcttccagttcatgaacatgggatatctttccatttatttgtatcttctttaatttctttcaacaatgttttatagttctgggtgtacaaatttttcacctcctcagttaaatttattcctaagcattctatttttgggggtaccaattataaataggattattttgttgatttcttttttgagtagtttgctgttagtatatagaaacactattgatttttatatgtcgattatgtatcctccaactttactgagtcttttttgttagttctaacagtttttggcagtcttcagagttttctatacataaggtcatgtcatctgcaaacagggaaaacttaacttcttactttccagtttggatgtcttttattttttttctctaacctaattgatttagctagaacttccactactatattgagtagaagtggtgagaacaggcattcctttcttgttctggaccctagataaaatgttttcaattgttccccattgagtgtgatgttagctgtgggtttcttgtgtgtggtttttactatgttgaggtatattccttctatatctaactcattgagtctttatcattaaaggatgttaatttttgtcaaatgtttttttctgcatctatagaaatggtcatatggcttttgttcttcattctgtgagtttgatgtttcttgttgtttaatttgcataatttgcaccatccttgtgaggataaactgctggtcttttcaagatagaaggagccccatgtggtcaacctgctcccctggctggctggtctcctcaagaaagaaggccctctgggtgttctgctattgtctcttgctgaccattcggacattccgaagcagcaccagctcaatggatctttgcaaatgggaggatcagcccttgtggccactctgtttatcaggccatcataccatcaggtggccaatgataaaggctggaaaatgttatgtggcaaaatgaatgcctatctgcctcctatgtgacatacaacacaaatattttcatttatcatatccagtcctctatgtccatctacatacctgtctacactgtttcatcattttctttcaaagcccatgaccaggtggtcccaccacctcaaatgactttttcttccagacaacgtggatgaccagatgtgccgcttgcagttccaccctttgcagagattttttctatacacccctttttcagggtgtccctgaacttggctataatgaagccatggctcattttttattgtactcacataccaagccaatctgtctataaagcaaactcaggcatttttctcttcttttttttttttttttttaatagtacaggacatctcctgctccccaatggaccctaggtacaagctaaaggcgtggtgttggtgcgataatggtgaatgccattgggatctgctggagtcttggctttttttttcagactgaatcttgctctgtggcatagactggagtgcagtggcacaatctcggctcactgcaacctctgcctcctgggttcaagcaattatcgtgcctccgcctcccgattagctgggataacaggtgtgtgccaccacacccagctaattttttgtatttttaatagagacagggtttcaccatgttagccaggatggtctcgatctcctgacctcgtgatccacctgcctcagcctcccaaagtgctgggattacaggtgtgagccactgcacccagccggggtctcggctttctacacgtgcagctttctcatgcctctggtcctgtttgggttcattctcagatgtgccatttccaccatggattggggctgggcctgtctaatgttacgacttagtagggcccatagaatcaggttatagtgggaaatttcatatatgtggtcattggtaccccgtcatcaagcatcccatatctacaggacttggtaacaaaccaggaactatttctcaaagacatataaatatttccagtggatggcatagcctcattctagaatccttaaaacctgatcatgattttcccactaagagattccatatggccaggcatggtggctcacacctgtaatcccagcactttgggaggctgaggccagtggatcacttgagcccaggagttcaagaccagcatggccaacaaggtgaaaccctgtctctactaaaaaataaaaaatacaaaaaattaactgagcatggtggtgcaagcctgtaatcctagctacttgggaggctgaggcaggagaatcacttgaactggggaggtggaggttgcagtgagccagaatcgtgccactgcacttcagcctgggcaatggagtgagacttggtcaaaacaaaaaaaaaaaagagagagagattccatagatgcactctgaattttgttcaccaatgaccttcaacaccatagatctagcagataatatggcccaagcataggggtgtatgatgtgagaagaggagattatgttggtatgtgggtgatccatttaaacacttatcagtagactttctctcaattttcacaatcaatggtcaaatgcaacagacatgacctgaaaaagaaatgacaaccaggacttggaatgcttagggatgaaggtcaaggtcaccccaccacctgaatcacccaacaacagaagtgttatacaaggagaggggaggtcgggtgcggtggcccatgtctgtaatcccagcacattgggagactgaggtgggcagatcacctgaggtcaggagttcaagaccagcctgaccaacatggggaaaccccatctctactaaaaaaaattagccagatgtgatggcacatgcctgtaatcccagctactcgggaggctgaggcaagagaactgcttgaacctgggaggcagaggttgcagtgagccaagatcacaccactgttctccagcctgggcaacaagagcgaaactcaagaaggaaagaaggaaggaaggaaggaggggaaggaagggaaggaggggaaggaagggaaggaagcgaaggaagaaagaaaagagagggagggagggagggaaggaaggaaggaaagaaggaaggaaggaataaaaaaacaacaaaaaggagaggggaattgaggatggtgacaagggagggggacactacctatatcagtgggaccttgagatgacaggcagcagcagaggctgctgtttgaaccactgaccctccttttgtaagtatttcatcctattggcctctcttccctaaaacgacacaaaggaaaccatggggaatgccactccttgaatgtacacaaaaagtttatccaaatggctgaaggagtggatggtcatggatgctgcgttgcattccttacttatccatttcagaatgaaggtcctgttcttcagggcataaggagtgtagccatatggcagcctgcagcctcaatccccttagagagttgctctcagctgaaggaggctgctttattcatggtggaaacactcatctctcttgctgtaggagcataactgacccagagccatctgtattcattactatgtttgtgccaagcttgctcctgggctgctcccatcacggctagaacacagcaaggcacctgtgcatgctccttcctgtgtccacaatgacattgatgacctgggtcaattactcctgccaggtgggagctcctctccttggcatgagagccctgaagtgctaggcagcagcatggcttgaagttcttagagacttctgccctttctctagaagggctaagccttgtttgaaatgcttgttccctggtaccataaagaaatagcacttgaatataaatttaatttcctcagccaggccatttttatactttctgcagaaagggtacactcgccagcagttttgccacgagagtatactgaacaaaggagacaaggtcatttataacctgatgtgtccaccctactgctgggtccggtttccactggctggaacgggaccgcacattccgtgtttgtcctgattggctagcaacttagaactttttaaaagaggcaaaggcagaggagaacaaaggaaggagaaagtaacttgtggaatgttgagaaaggtaaaaacaccttcaaataaggaagaggaacaggctatgacctaatgcttgcttggaccagtataagcatgccagggcaaatatttaggctaaattgtgagagctaaaaacataaagtacattgatttctttattacggctagcagatatttaagaatgttagcacaggtctttgaataaattttgcttctaagggaagttactatttattcccaattagacaaggaggaaagtctttgaagaggaacctctacttacttttacagcctttagaagccaagacctctaaatctgcagaagtcagacttgagaacagaagcacaaagtccccaagtggctccctgagaggaacatcaggcagggacccttctactttccacccttgattttttttaactttatcttaagctcaggggtacaagtgcaggtttgtcacataggtaaactgggtcataggggtttgttgtacagattatttgatcacctggctattaagcctagtacccattagttatttttcctgatcctcttactcctcccaccctccatcctctgaaaggcctcagtgtgtgtagttcccctctctgtgtccatgtgttcccatcatttagctttcacctataagtgagaacatgcggtatttgcttttctgttcctgcattactttgctaaggataatggcctccagctccatccatgtccctacaaaggacattgatctcattctttctcttttttttttttttccagagtcctgctctgtcaccaggtgggagtgcagtggcacgatctcggctcactgcaacctctgcctcctgggttcaagctattctcctgcctcagcctccggaggaactgggactacaggcatgagccaccaagctcagctaatttttgtatttttagtagagacggggtttcgccacgttggccaggctggtctcaatttcttgacctcgtgatccacacgccttgggctcccaaagtgctgggattacagacttgagccgccatgcctgcctgatatcattcttttttatggctgcatagtattccatggtgtatatgtaccacattttctttatccagtctatcactgatggacatttaggttggttctatacctttgctattgtaaatattgctgcagtgaacatatacatccatgtgtctttatatactaatgatatatattcctctgggtatatacccagtaatgggattgctgggtagaatggtatttcttttttttttttttttttttttgagacggagtctcgctctgtcgcccaggctggagtgcagtggcgggatctcggctcactgcaagctccgcctcccgggttcatgccattctcctgcctcagcctcccaagtagctgggactacaggcgcccgccactacgcccggctaattttttgtatttttagtagagacggggtttcaccgttttagccgggatggtctcgatctcctgacctcgtgatccgcccgcctcggcctcccaaagtgctgggattacaggcgtgagccacagcgcccggccagaatggtatttctgtctttaggtctgtgaggaatcatcacactgtcttccataacgaatgaactaatttatacctccaccgacagtgtataagcattcctttttctccacaacctcaccagcatctgttattttttgactttttaataatagccattctcactgtccacccttgagttttggacccatggattttatatattggggatgtagcacattatgatttttctttgtcttatggtgtatattacatcctgccaattttgtagtcagtatctgtgtattcaaatacctacattaattattttcattctctttgaaattaaacacattcccctattgtccagttaaaaacatttttcaaaatactctcccatactccatgcccccgttaggctacactttctctcttctctccgcttccctaaaaacttcatagttggtgtacatttgccacctatatttcctctagacacactcttcacctactccatatgggctattactgtcctacccttctatttagaggtaataaatgaagcccttcctaaaatcaacaaaggcttccatgtcaccagaaaatgtcaaaaactattgttcagtcctcattttgttggttctttcaccaggacaaaacctactcaccaatttgctttccttcaggaaggactactttggagtagatggtgaatgccagggactgaaaaggggagaaaatggggagatgctggttaaaccacaaagggttctagtgatgcaagattaataagttgtggatatgtcctatacaatacagtgcttgtagatatcaataatgtattatttagaaaaatgtgcttaaaggcagacgttatgttatgtgtggttatcacacattaaaatattaaagccagttgaaactttaagaggtgatgggtatgtccctcgccgtaatggtggtgatggtttcaaggatgtatgcctgtttcaaaactcatcatgtgtatacattaaatgtctacagcttttacattttaatcatacttcaataaagtggttaaaacataaggaaagtaaatttaaaaaaaagatccctttgcctctataaccttgtggacaccaagggatccataaaatctccaaagtttcttcaagggaggcacattccagagagaagattgctgagttttggttccttatagaaattaaactttcctgccagggatggtggctcatgcctgtaattccagcactttgggaggctgaggcgggtggatcaccggaggtcaggagttcgagaccagcctggccaatatggtgaaaccccatctctactaaaaaaaaactacaaaaattagccgggcgtggtggcaggtgcctgtaatcccagctactcaggagactgaggcaggagaatcacttgaacctgggaggcagaggttgcagtgagccaagatcacaccactgcactccagcctgggcgacagagcaagattctgtctcaaaaaaaaaaagaaagaaagaaaagaaaaaaagaaattaaactttccttagggaataccttgtgacttttaaatccaactaaagaaagagtttctccttggagaaaataaattcatctcccactaccgctgcaaaattgcctgaacattttccattctgctatcttctttgtatcctaagggagctgaattatttggagggtggaaaaacaatagaacaatttatttaatgaggctctctgagagttcaacccttgaggcaatggaaacttcgaactgggccctgccacccctcaagtgtaattctctgatcccagccttggaaaaaacacaattgggtttaacagggacacaccatggagaagagaaagcatcagtgacaatcagagtcagtgtgacccaacaagggctgctggggtaagaggagagagagtgggtactgggctgtacctttagagtaataagcctagacagtcccatatttatttagtctatgaagctgaagttcctgtatttttttttttttttgagacagaattttgctcttattacccaagctggagtgcaatggcacgatctcggctcagcacaacctccgcctcttgggttcaagcgattctcctgcctcagcctcctgagtagctgggattacaggcaggcgccactacgcctggctaatttttgtgtttttagtagagacggggtttctccatgttgctcaggctggtctcgaactcctaacctcaggtgatccccctgctttggcctcccaaagtgctgagattacaggtgtgagccaccgcgcccagccttgaagttcctgtattttaaaggtactttagttttcaccaataccagtcttttgtagcccttgttctgttccttttctttccttctggaagctgaagcctctttccgggaacagttaggaatgtccatacttgaatgtatgattttctgatgatctccaaatcctctccactctctgccataaactgtaggttcctggtaggtttcctgaatccaatcacctcttcctgaatgactcactgaagatctgtcctacgcaaggtattgtctattttgtttctaatatgattggattttcttttataattttactatgttgctggcagatctgacttcaaatattactaaagaattctatatcattgttgttgtcattactattttttcacttcagtgtccacagtgccatgtaaaaaataatattatttttgacatttgaaactcgggccaatttcctttatttcatttttaccaatgtctttaaatgttcaggagactctcagacgattgatgctgagtagactgccttggcctattcatgaatttaagaggaatgctgtagtgtttatttattgattgattgattgagatggagtcttgctctgtggcccaggctagagtacaatgacatgatctcgcctcacagcaacctccgcctccgccttcaagtgattctcttgtctcagcctcccaggtaactgggattacaggcttgcaccaccatgaccagctaatttttgtatttttagtatttttattagaaatggggtttcaccatcttggccaggcttgtctcaaactcctgacctcaagtgatctgcccacctcagcctcccaaagtgctgggattattacaggtgtcagccaccactcccggcctgagaaatgctatagtgttttaatatggactatgctgttggctgtggtttcctttactaggttaaattgtccttggtggccgggcatggtggctcatgcctgtaatcccagcactttgggaggccaaggcgggtggatcatgaggtcacgagattgagaccatcctggccgacatggtgaaaccccatctctactaaaaatacaaaaattagctgggcatggtggcgcatgcctgtagtcccagctacttgggaggctgcggcaggagaatcgcttgaacctgcgaggtggaggttgcagtgagccgagattgcgccactgcgctccagcctaggcaatagagcaagactctgtctcaaaaacaaaagcaacaacaacaaaaattgtccttggtttcctcatgtcctgagagtctctgcactggctgctgtttgattttctgaaatatattattttgcattgtgtttgtggttaaggttttttttttattgacctattattgtgatgaactatgtaaacaaacatcctaatattaagcctgtttgctattaataggagtcttacatgttcacggtgtatgattcttttaaaataaacagaaacgtattttatttaactttactgttcaatttagtgtctatattcaggcatgaaatgaataaaaatttctgttttgtgttatggatgtcagttttgatctcaatctttattacacatccaaaatcgtgtttcttgaacacctactaatgatacaggagctaaaaagaaattacttaggcagctagtgagggtaagagagtccttggcaagggtttccattttaacaaaaagcatcccccaaaatcatttcttttttaacaaagagcagcctgaaaaaatcaagctgcagacatagaaaagcgggctgcaagcttgcacgggtgaatgctggcagctgtgccaatgggaaaaggctacctgggggccaggcgtgttcaacatggaggctccatcttccttttgtcaaccttgtgtgcattaaaaagcaggctatatggccgggctcggtggctcacgcctgtaatcccagcactttgggaggccgaggtggacggatcacgaggtcaggagatagagaccatcctggccaacatggtgaaaccccgtgtctactaaaaatacaaaaattagccaggcgtggtggtgtgcgcctgtagtcccagctattcaggaggctgaggcaggagaatcacttgaacctgggaggcggaggttgcagtgagccaagatcgcgccactgcactgcagcctgggcagcaagagcgaaactccgtcgcaaaaaaaaaaaaaaaaaaaaaagattcttcgtgcactttgtaaacggcacacctggtccaaccagtcctttgtgccctgtgtaaatcagacaccacctcctcaagcttatctataaaatcccatgcatttcacaatggaactggaagacccactcggcagcgcctcggagagagcttttctctttctctcatctatgaaacctccgctgttaaacccaatccttgtttgtctgtgtccttgatttccttggcgtgaggcagcgaacctcaggtattaccccaaacgaatgacactgcttccactaagtgacgggtaccatgtacacctctggaaagaaaaatgatgaaagaaaacacaacctcagatccacaaataaacgtaaaattacctacatgagatgcactcatgtagaaagagcacaggatggtctcttgtggggctcacgctctgacccccctaaccctcactctccactctccatctcactggtctctcaagtcccaattactaagctctctgagtcacgtgcaaccaggcatttcatcctcccagcctacgctgtctattctttccttgcttccccttttgaatcatgacccaatcttcttctcttagctccaagattcctatttcagaacccaacttcctagactaaattcgtcttctatgatgtttttctggtctttgattagttaaatatctctaggcatcagtatcactgccgtttttctaccatggtaaatgtaatcatttattttcaaatcttaaatttgccttttctttttctaggatgacatgatttatgtaagttttgaatattttgaaccaaatccatgaattatatatgttgatgatcgactctactgaccttagtacactgcaaccccactggaaagcacgtacacacgagaacagactcacacgtgacttgtgttttattttaatggctgtgtgcttttgtttcctcctcttatatatgtagtccacatgcttttttctcttcttggaagaatcacctggcaggcattctgaaggaaggagtcacaggaatcttcattaattagaagtgttgtatggcagtcaaagaggtaacagttctattcatcttcaccagaattccatccttgatggtcagcacagtttgagatggatattaagaaatgacactcatgcaaggcagattattgtgatgttaagaacggaagctcacatttatgatatggccgttgtatgccacagaaaccagagcagaaaaacaacatggatcatctcatttaatttcactcttcaatccgtccatgcagaaaatatttactactcttatttagaggtgaattatctgcagctaagagggtttacatgtctttcttttttttttttttgatatagagtctcactctgtcacccaggctggagtgcagtggcacgatatcagctccctgcaacctccgcctcccaggttcaagcaattctcctgcctcagcctcccaagtagctgggactacaggtgcgcaccaccacgcctggcaattttttgtatatttagtagagacggggtttcaccatgttggccaggctggtctcgaactcctgacctcgtgatccgctcacctcggcctcccaaggtggtgggattacaggcgtgagccactgtgcctggccacatgtctttcttaaggtcacacaatagtaagttggtggaccaaaattctattccagaaaatctccctcaagattccatttcctaaattacacctatgtattgtaccttggaagagtgatatatccaaaataactatcttataagaagaaggagtttaataatatcgacagctatcatttactgagactcttattgtacacaaagccacttttaaaacctcacaaagtgatactgacaatcatatttttagaaagaaaaaaataaacgtacacttagataaaaggtatatgttcttttgatcaagagcaaagtagcattactatagttaacaacattgtattgcatatttcaaagtaactagaaaagaggacgtgaattgttcccaacacatagaaaggataaatactgaaggtggtagacacctcagataccctgatgtgattattatgtattctatgcatgtaagaaaatatcacatgtcccccataaatgagtaaaacatgaggtatccatgaaaactaaggaactgagaattaactgtcacatcacctgtgtcaggtcacagaaaaaaagattgcctgagttgaaaatgcgtatcttaatcatgattatacacctattagcatgaaggaactatggagatgtatcaaaagacatggcgagtctgcagttatgtggaaggatcctatcaaagaagaaattactgtccataggtttgaatcaaataattaaaactcaggagtatatggtaaaggagaaagattactgctaaattaaaggtagtttgagaaactccgcacgtttcaaatggaattaggctaccaaatggctgagtgaatcaggatctttggaaggactccatagaagttgcatccaagggtgatattgaagagtgattgaatgttgctttttcctccttccccagtagacacaacagctacatggaagcagaaaaccttacagaattatcagaattcctcctcttaggactctcagatgatcctgaactgcagcccgtcctctttgggctgttcctgtccatgtacctggtcatggtgctggggaacctactcatcatcctggccgtcagctctgactcccacctccacagccccatgtaattcttcctctccaacttgtcctttgtggacacctgtttcatctgcaccacagtccccaagatgctagtgaacatccaggcacggagcaaagacatctcctacatggggtgcctcactcaggtgtatttttaaatgatgtttgctggaatggatactttcctactggctgtgatagcctatgaccggtttgtggccatctgccacccactgcagtacatggtcatcataaacccccatctctgtggcctcctggttctggcatcttggttcatcattttctggttctccctggttcatattctactgatgaagaggctgaccttctccacaggcactgagattccgcatttcttctgtgaactggctcaggtcctcaaggtggcccgctctgatgctctcctcattaacattgtcttgtatgtggccatggcactgctgggtgtgtttcctgtagctgggatcctcttctcctactctcagattgtctcctccttaatgagaatgtcctccaccgagggcaagtacaaagccttttccacctgtggatctcacctctgtgtggtctccttgttctatggaacaggacttggggtctatctcagttctgctgtgacccattcttcccagagcagctccatggcctcagtgatgtacgccatggtcacccccatgctgaaccccttcatctacagcctgaggaacaaggatgtgaagggggccctggggagactccttagcagggcagcctcttgtctcttacggtacacaacctcagaactaagaggatgctatgggtcccttaagcaaatgtgaatgcgcatatcctagatcttgctctcccctaaaatatatgttgcagtttcctattttcaaagcacctacgactttgcttaaaatgtttttgtatggccgggcacggtggcttacacctgtaatcgcagcactttgggaggcagaggcgggcagatcatgaggtcaagagatcgagaccatcctggccaacaggtgaaaccctgtctctaccaaaaacacaaaaattagctgggcgtggtggcacacgcctgtagtcccagctgctttggaggctgaggcaggagaatcgcttgaacccaggaggcggaggtttcagtgagccgaggtagcaccactgcactccagtctgggtgacagagcgagactctgtctgaaaaaaaagaaaaaaaaggtttttgtattaggttggtgcaaaagtcattgcagttttgccatcaaaagtaatggccaaaactgcaatgacttttgcacccacctaatatatttctgctgaagagctctctcagtaattccttttaaagttttcttctctgcacatagtccttaaagttccatctttgatccatttttttagtgccattcctgagatttctaacttgacattataaaactcttcatgtcaaatgctgacacgcgtcctcgaaaatgatccatttgaatgttactgtttcatcttaatttgattttgctcgttatccctggaagaaataaaatgaaattcataaaatattcaaagcaaagtacttaccatatcaaaactctgcttactagtttacatctataaactatttcatcctaaaaacctttctttgagttattttctctcattcactctatttctcagaggaagagattgagttgaggtcggctatatcaggcagtgtgacactgcagccccactactaactttgctgacccgaatttcataaaaatactcaggagcttttcaagttgaaagctgggatctagattcacaggctggttcattcataaaattcatagagattagtgcttcggagtaccctgagctgttgcttcattccttgtgattcttgcttttgtccttcttacttctcttttcccttctatccttcctcctttctcccttctttatcttagtctctccctccttcctttccttgttcctctaggtttttttaaaatttatttatttatttatttatttatttttgagacggagtctcgctctgtcccccaggctggagtgcagtggcacgatctcggctcactgcaagctccgcctcccgggttcatgccattctcttgcctcagcctcctgagtagctgggactacaggcgccccccaccacgcctgggtaattttttgtattttttttttagtagagacggggtttcaccacgttagccaggatggtctcgatctcctgaccttgtgatccatccgcctcagcctcccaaagtgctgggattacaggcatgagccaccgcgcccggcctagattgttttatttgttaatgttaatttccttcgttcctttttatggtggagcaatattccactagatgtgcagactgcaaagtgtttattcactcatccattgatggacaaggggtgatttccatctttgggctactgtaaatagtgctgccatgaacatgcatgtaaatttgtttgtttggttcttagtttccatcagttggggaagataactagcagtgggacttctgggtcctatggtaattatatgtttaactttttgagcaagtgacaaactgagttttatagaagctggcacattgaacatttccagcaatgtataaagttctagtatctccacatccttgccaatacttttttaaaaaaacaactgtagccagccaggtgtggtggttcatgcctgtaatcccagcactttgggaggctgaggtgggtggatcacttgaggccaggagtttgaaaccagcctggccaacatggcgaaatcccatctctaataaaacaaaaattaaccaggcatggtggcatacgcctgtaatcccagctacttgggaggcagaggcacgagaatgcttgaagctgggaggcagaggttgcagtgagccaagattgcatcactgtgacagagcaagtgacagcctgggtgacagagcaagactctgtctcaaaaaaacaaaaataaacaaaaaaacaatgaagtggtgtctcattgtgctcttgatttccattttcctaatgattcattgagcatctttccacatgcttgttggcagtttgtatatctgctatgaatcaatgtcttttcacatctttgctcactttgtaattgtgcagtttgtacttttgtttctcacctgtaagaattcctcatatattcagaatactcgacccttatcagatatatgcttgccaaatattccccacccatttgtatgttatctttccgttttttgaagtatacaatttgttattaactatattcatcataaagtgtaaatagatctcttaaaatcacttcccctgtctcactgaaactttgtgtcttttgactatgatctacccaatcccctcacttcacagcctctggtaacctcaatttactctgtttttatgagtttgacttgttttcatctacctgcatgtgagttcatgcagtatttgtcaagccgtgcgtggtttatttcacttaccagaaagtcctgcaggttcatccatgtggtagtaagtgacaggtttttccttctttgtaaaggctaaatagtattccattgtgcagatagaatacatttctttatatttctgatgatgagtccttaggttgattccatttcttggctatggtgatgaatgctgccatgaaaacagaaatgcagatatctctcaacatactgctttcatataaactcagtagtgggattgctggatcctaaggtagttctattttcaattttagaaggaaccttcatactgttttccataatgcagcactaatttatattccaaccaacagtatgcaatgtcccttttctccacatacccaacatttttacaattcaactttttttttttttgagatggagtcttgctctgttgcccaggctggagtgcagtgatgcaatcttggctcactgcaagctccccctccttggttcacaccattctccttcctcagcctcccgagtagctgggactacaggcacccgccaccatgcctggcaaatattttttgtattttttagtagagacggggcttcaccgtgttagccaggatggtcttgatctcctgaccccgtgatccatccaccttggcctcccaaagtgctgggattacaggctgagccaccgcacatggccaacagttcaacttcttgataacagcattctaacacgtacaaggtgatatgtcattgaggtttgaatttgcattcctgaagatttgtgaagctgagtgttttttcatatacctgttaatttgcatgccttctttctagtaatgtctattcagatcctttgtctattttccaatcaggttgttttctcacaattgagttgcatttcatacagtcttaatattctttctttttctttttctttttttttttttttttttgagttggagtctcgctctgttgcccaggctggagtgcagtggtgcaatctgggctcactgcaacctccgcctcccagcttcaagcaattctcctgtctcagcctcctgagtagctgggattacaggcacatgccacagtgcccggcaaatttttgtatttttaatagagatggggtttcaccatattggtcaggctggtctcgaactgacctcaagtgatacacccgccttggcctcccaaagtgctgggattacaggcatgagccactgtgcctggcctgaatattccctcttgaataggtcgttttttcttttttaaaatttagtcgagatggggtctccctaggtggcccagtctggtctcaaactcctgggctcaagtgatcctcctgccttggcctctccaaagtgctgggtttacaggcctgagccaccacaccaggccccctctttaattttgcaattgtattctcccattccataggatgtctcttcactctatagattgtttcttttgctgtgtgggaactttttagcctgatgcaatctcatttttctgtttttgcctttgttgcttgtgttttgggttcttatccaaaaaatcattgcccagtgtaatttcatggaggattattcctatgttttcttttagtggttttgcattttcaggtttactgagacctgagatgaggagctaatttcattcctctgcatgtggttttccagttttcccagcaccatttatggaagagactgtcctttccccactgtgtgttctcggcatctttgtcaaaaaatgatttgccataaattcattgattcatttctgcaccacctcttctgttccattgtcctttgtatctgtgtttctattggtaccatgctccattttcttaacagaacattttgatagagaaaagttttaaaatttgatgaagttcaatatatctatttttttgttttgttactcatgctttcactgttgtatctaacaatctgcttccaaataaagtgtaatcaagatattcctgtatgtttttttctaagagttttatgattttagctacattatatttaagctattgactttttatttatttatttattttgagacacagtctctctctgtcacccaggctggagtgcagaggtgtgatctcggctctctgcaacctctgcctcccgggttcaagtgattctcctgcctcagcctcccaggtagctgggattacaggtgcccgccaccacgcctggctaatttttgtatttttgatggagatggggtttcacatgttagtcaggccggtcttgaactcctgacctcaagtgatccacccgcctcggccacccaaatgctgggattacaggcatgagccattgcgccaggcctgttgatctgttttttatttgatttgatttttgtacatggcagaaagtagggttcaatctactttcctttgcatcgagtttgttcttggaagggtttagtttgttgtgctgtgaaacaccttattaataacatccacttggcagcagaatgtgttagcctagggttcaatctgtctaagtggtggttgtcagagagatcattgggtttataaaaaggtcacaaaggcaagattatgtttgacagagccctgctcatgaacattcagttcctcagcagaccagcctcttgtccatgacagatcaaggtctcagaactaagtggatgttgtaggtccattaggcaaatgtgaatttaaatatcccggctcgaccaggcttggtggctcatgcttgtaatcccagcactttgggggctgaggtgggtggatcacttgaggtcacgagttcaagaccagcctggccaatgtggtgaaaccccatctctgctaaaaatgcaaaattagctgggtgtggtggtgggtgcctgtaatctcagctacttgggagactgaggcaggagaattgcttgaatctgggaggtagaggttgcagtgagctgagattgcgccattgcattccagcctgggcgacagagtgagactttgtctcaaaaacaacaactacaaaactaaaagaaaacaagaaataaatatcctggctctttttctcctgaaaatcacatgcttcatttttactcttcccaaaacacttgtgatttggcttttgctacatgtttttactttaggttctctcagtaactcccttggtaatttccttctaacttttccgttttatatacagtctttaaagttccatctttggtccattttcttagagccactcttgagagttctcacgtgttgtttgaaacacttatcatatcgagtgctgatatgatgacatgctttcctcaaaaattacccatttgcatgttagcacccttcacctaaacttggttgtgttcttgtttcctctggaagaaattggatgaaaatcatacaatagtcaaggcaacgtgtttcccttttaggattgtgcttgttgctttacatgtatggctttatttaatcctgaaaacatttctttctttttgtttttgttttgttttgttttgagacacagtttcactctgtcacccaggctggagtgccatggcgctatctcagcccacggcaaccacctcccgggttcaagcaattcttgtgtctcagcctcccaagtagctggaattataagtgtgcaccaccacacctggctaattttttttgtatttttagtagagatggggttttgccatgttggccaggctgatctcaaactcctgacctcaagtgatccacctgcctcggcctcccaaagtgctgggattataggcatgagccaccacagttggccctgaaaacatttctttgacatgtcttttctcattcaccttgttccacaaaggaagaagcagatagaggtgaactataacctggcaacttgacgttgagaccacactccaactttgctatcctttatttcataagaacagtgatgtgatttttcacatcaaattaggaatgtagatttgtaagcttgtttgttctgatgattcatagtaatgaactgcctagaataactgagacgttgcttccttctttgtgattattccttttcttccctccctccctccttttttactttcttcctttcctcttctttcttccctcattccctcctctttcttccctcattccctcctctttcttctctcattccctccttccttcttgtctttctttctttccttctttatttgacctttatttcccataattgcagttttatgatctaaccccagattgtagaacatgtaataattatacgatagaaaagatttgttctctcatatagtttaattttcttctgagactttctggagatgtcttcaggaatggaagccacagaatgtggactgtgtttgggatgcagttcacccttttgatgagaactggtagaactgggtctgcagtgaaggatggggtagtagatggtgtcagggttcatcccacatccctaagaccctcccgccatctccacacacaccatcctgtctgccaatggtcagcatcagctgagggatccactttccccaatgcatggtggcagaaaggtaatgaatgcttacaattttatgttgctctggcatttttttttttttttttgagccagtgtctcacagtattgtgcaggctggagtacagtggctcactgaaatcttgaactcctgggctcaagtgatcctcctcagtctcccaagtagctgggactacaggcatgcatcatcacacccagttagggggtctctctatgtgactcaggcttgtcttgaaatcctggcctcaaaccaggattggccaccttggcttcctgaagcactgggattgtaggtgtgaaccactgcacctggcaggcatctattttgaatacaggcttagctttctgatgctagaggcagggttccattgcctttgacacagtttccaattccacaccaccctcaaatggctcaagctggtgcaattgttgctccttgcatcatcctttgaaagtgcaagttgtaaaagtttatggattcacctcagagggtttatctgagaagttgcctcaagcagttagaagatacagcttcctgatgcaacttcagctgcagagaccagggaaggaggggaggccttagaggcctgagacttctgctggcatccttctcaccaggctgcctcctcccgggagagtccctccttcagccccagtccctgtgcaggagcctggtttctggaaaaggccccacagcctggtggacacagacccaattccagtatcagacccatcagtgaccactgtgttgggattcaacagcctctccagactgtgattctcactggcaaaataaaaaatctgtctgtctttatttgatcaggagtactaaggctccaatgagacagtgtatttgaaaaaccttgggaatccactctccaaagcctagcaggttttgttactattatccaactcaatgtacaattctaaggtaaattgaaaaaatgtataaatccattaaaaagaaaagttgaaggtctcacatttcctggtttccaaataaactacaaagatccaggaattaaaacagtgtggtactataatacataaagacacatatacagaaaaatggaagagtaaagagagcccagaaagaaactctcacttatatggtcacatgattttccacatgggtgccaagaacattcattgggaaaaagacagccttttcaacaaacggtgtaggaaaaacttgatttcaaaatgcagaagaatgaaggtgggttcttaccttacaccatatgcaaaagttaacacaaaatggatcaaaggcctaaacctaaattccaaacctataaaattcttaaagaaaacattgatcaataccttcatgacattggatttggtaatgatttgatcaataccttcatgacactggatttcttagtgatttcttgaatatgtcaccaaaagcacagacaacaatatatagataacttggactacatcaaaattaaaaaacctttgtaactcaaaggatatactatcatcagagtcaaaagttaacccagggaataggaaaatatatctgtaaatcatatatatatgcttagaggctaacaaccaaacaatattaagaactcctacaactcagcaaccaaacaaatgcccattaaaaatgggcagaaggccaggtgtggtggcttacacctataatcccagcactctgggaggccaaggcgggcagatcacctgaggtcaggagttcaagaccagcctggccaacatggtgaaactccgtttctagtaaaaatacaaaaaaatacaaaaaaaattagcgggcgggtggcctgcacctatagtcccagctactcaggaggctgagtcacgagaatcgcttgaacccgggtggtgaagtttgcagtgagccaagatcatgccactgcattccagcctgggtgacagagcaagactccgtctcaataaagaaaaaaaaaaattgggcagaggacttgaatagacatttctctaaagaacatatgcaaatggccaatgagcatacaaaatgatacccagcatcactcatcaataggggcatgcaaataaaaatcacaatgagataccacccaataggatggctattaagaacaaacaagcaaaaaaacctgtcgagttttggtgaaactgtagggaaggaggaatgcttacacagggctatggaaatgtaaaatggtgcagcagtatgaaaatccatatgatggttcctcataaaatgaaaaatagaactaccataggatgctgcaagttcacttctgggtgcatacttaaaaggatcgaaaacagggatttgaacagatatttgtataaccatgtgtggaggaaaagttaaatattaaattcgaactcaattgaacatggacacaaacaatggtcagcaagtcctcgaatgggtcgtgtgagccccttgaggcgttcatccagcgctgtttcggagaaatctctatttcaatctattcctatacattagttattgaaaaacaatagacaatcacgaaaacgagttgacctttttgcgttccttgggcccagtcgtgaagggccctcgtgactgggcctcatgccaaacaactcattacaaaaagagttagggtcccagactgcgccaaagcttcaggagacctctccttgtctgtgcacggactggtggctgactctggagcccagactgttgctggtgaatccttcatagtctggtgagtgtgtatatatatatttttttttcgcttcggcgacttcccgttgcaatttgcttattatatcaatgtgcttttttttttttttttttttttttttttttatggagtcttgctctgtctcccaggctggagtgcagtggcgcgatctcagctcactgcaacctccgcctcccaggttcaagcgattcttccgcttcagtctcccaagtagctgggattacaggcacgggccaccacacccttctaatttttgtatttttagtagagacagggtttcaccgtgttagccaggatggtctcgatctcctgacctcgtgatctgcctgccttggcctcccaaagtgctgggattacaggcatgagccaccgcgccgggcctcaatttgcttattatagtaatttgcttattatatcatttgcttattatatctacattgccatttacgtgggataaagcttatttacccttaaaggtattgtgtgtgtgtgtgtgtgtgtgtgtgtgtgtgtgtgtgtgtgtgtgtgttttcttctccccttgtgcgtttcctgcacagaacaccatgtttatagcagcgttattcacaatagctaaatatatggaagcgacacaagcgtccaccaacagatgactggagaaacacaatgagatccatccatacaatggaatatttttcagctttaaacaggaaggcacttctgacacatgatacaacagggatgaatctagacaacattatgctcagtgaaagaaaccaatcaccaaagggcaaatacagactgattctatttatgtcaagtattttgtgcagttagatttgtagaaacagtaatcagaatggtggttgctagtggttagcgagttgaaggaaaggattttgtttaatggttgctgagtttttgttttgtaggatagaaaagttctggagatggatggtgaggatggttgtacaacattgtgaatctacttcatgccactgagctatatactttaaaatgatgaaaatgataaaatgttgtatttaccattttatataaaaccatttatatgtataattttaacatttatatgcaatatcttttatataataaaaaggaaaataaaaagtagacagatcttaataaaaaataaatgaaagaagtgaatagtacactcaggattcctcctgagtggaggaagagcccaaaagcttctgtggacattcatttcctcttcttcttcctctgttaatatggggcagtccttagagactggggaacatggaccagtttggctaatgaggagctctgtgccttgagcccccaaggccctagaatagtaaatactcagcctatgcctccagccctgcagtgtgagcttccagtccagtgggctccacacctgtcgtctgcatcaggaggctcatgtctgaccctgtcttcctgccagtcctgaggacggagcctgagcctccatcgtgcaccacacagggaggacagcggacctactctccatggtcatggcccagcagaggggaagcgcagctcagtgagtgctgagggacggttgggagccttgtttcctcatcctcagcacaaacaggacagtggggtggcagatgggaggacaccaatgtgcaaaatgtcagctcagacgactgtggagtttatgttcggggtttattttcagggtttatgttcagggttgtgtgtgtggtctttcatttcatattgctgcactattttacatttccatactcccttacaagcattcctacttctctatggtttcaccaaaacttgacaggttgttttgttcatttgctcttaatagccatcctattgggtggtatctcattgtgttttttatttgcatgtccctgccaatgagtgatgttgaatatcactttgtatgctcattggctgtttgtatatgttctttagagaaatgattattgaagtcctctgcccacttttaatggggtatttgttttgttgttgagttgtaggagttcttggtgtagtttctttgttagcctcttagcatatagatgatttgcaaatatattttcctattccctgggttaacttttgactctgatgaaattttacattcctcccatgctgattgaacttcccatagacatctcacccaggatagcaaaaagtgggtccctctaaactgtgccctaaacacaacaaaaagtttataaaggtgatgttgaggatgaggaggaagatgccagtcaccatgacatcatgaattcttactgagggcttcctaaatgcatggatctcagctctgtgttttgtatagcttgtttcatttcatcttcataatttttcctgagttatagctgcacacattattattattattgtacagaggaggaaaggagcaatgcatttttatatagctcgtaccagatcatgaggtagaaagaggtgaagccacatttgcaccaggcagtctaagtccagacacatagcatttggccaggcctctctctgcatccaaccttccccccctcgaatccgtgtcacacccagcaggtgcccctgctaactgtacccttccctttggggcttcctggtagaccacagctagaccagtgggtgccacgttcactgtgtcaagtatagaaagggcagctgagatcacatcaaagatcccagaaagaactggcacaggatcactcagggcgcatctctcccttgcccctgtttctggctttccttgcagctctctacttcctcaaaggagaaataaaatcagggtcttggaatccatttctattcaggaaaccggaaatagtttcaaaatgcgcttcagatgcacctgtgcttaagacctctggccattgcttaaaactttctgagagctgggaaacaatgaagaagtttagtgccagagactcaaagaccaaccatttaattccaaatcctgcccatgcccctgatctgtgtgacaaggggtgagatgtctgtgtctctgaggctcaacactatcatctgagttgatttctggtagatcccactgcagtgagcaatgattaaacagaccgtgtgtgctcctgtgtgatccctatgtgatggatgcataaagtgaagtgtattctacatgttttctattaatattccaaggttaatctccataccattgaactgaaatatccaggaacctagctatggttcccaatgtctctgacaggacatttaatttttgcccttatataagtaagtactgaggattgtgagaggaatatttgagtttctttcaactctgatttcccagagcctgtatcttgcttggtacagaggagacaccaaaaattagaatctctgttacatattgaatagacccttccttagttcacaaaactggctgtgatcagtgtgacttcaacacactcactgctttcctatctgtactttcattccttccaggaatgtgtcacaaactaggcagaaggtaaaatagcacttttttgtgtctatattatggacacataataatagcatctacaacattcaattacttaaagaccatggcagagatttttacaggcataaaaaaagagaaaaggatgcagaaggaagtgggggcaggtaaaccttattgtttagatcaagatacattttagagtttcacatgattccagccacaacgaaagtaatgccaaagtattttaacattaccttggccaggcacagtggctcacacctgtaatcccagcactttgaaaggcagaggtgggcagattacttgaggtcagaagtttgagaccagcctggccaacatggtgaaactccatctctactaaaaatacaaaaatcagctgtgcatggtggggcgtgcgcctgtagtcccagctactcgggaagctgaggcataagaatcgcttgaacccaggaggcggaggctgcagtgagctgagatcatgccactgcattccagcctggtgacaggctcaaaacttcgagactcaggtcttaaaaaaaaaaattaaaagcattttaacattatattaatgttctgtcatccacaggtacgttgcacactatcaacatctttgctatcagtgatgtcctggtaattatgtgcatttaactaaaccttccttttaattacttattgatttaatagtcaaggtctcactctgccactctgcctagagtgcggtggtatgatcatggttcagtgcagcctcgaactccagggctcaagcgattctcctgactcagcctcctgagtagctgggactacagggcggcgccaccatgcctgtctaattttttagttttttgtaaagatggggttttgctgtgttttccaggccggtcttaaactcacatcctcaagcaatcctcctgccttggcctcccaaagtgctaggattccaggtgtgagccaccaccctgggctactttcttatcaaaactccaagtccacctaaggcaaggacaggaattataattaagtgaattttaaaagaaagcccacatatttgagtgagtacttacttccatgaagaatgaaagtcagaaaacgtaagaatgatggaaaccgtagaatataactggtatgtaaagatgttttctggctatgaactatgaactttcattgagttttgagacaacatgatcctagatctcattgagtgttgataaatatcctcaatcaatggaatttgtagaattgtattagaataaaacaagacatagctgactccttcttagtatcctttcaatggatttaatctttttcttaaaggggcaagaatatttttgttgtatattttttcctgataaattaggctatattttaccgtgatcatggatttctaaaatctctaatgtttttgctctcctaacattcttcaatagactgtctctaagttaagtgtatacagaaagaggtgaataacacaaaatcaattatgaagtaactctaaggaaattgggtttgtcacaactgagaactattgctgagggtgtataatcctatgtgaaaacttaatttcttaattgcttgtatccaaaatatagacacagtgctagatgctggtttacttatgtcctattttccaattctctttttttttttcctcaaaaggtgtccgagctacacagagccacagaatctcacaggtgtctcagaattcctcctcctgggactctcagaggatccagaactgcagccggtcctcgctgggctgttcctgtccatgtacctggtcacggtgctggggaacctgctcatcatcctggctgtcagctctgactcccacctccacacccccatgtacttcttcctctccaacctgtccttggctgacatcggtttcacctccaccacggtccccaagatgattgtggacatgcaaactcacagcagagtcatctcctatgaaggctgcctgactcagatgtctttttttgtcctttttgcatgtatggatgacatgctcctgagtgtgatggcctatgaccggtttgtggccatctgtcaccccctgcactaccgaatcatcatgaacccacgcctctgtggcttcttaatcttgttgtctttttttattagtcttttggactcccagttgcacaatttgattatgttacagctcacctgcttcaaggatgtggacatttctaatttcttctgtgacccttctcaactcctccaccttaggtgttccgacaccttcatcaatgaaatggtcatatatttcatgggtgccatatttggctgtctccctatctcagggatccttttctcttactataaaattgtttcccccattctgagagttccaacatcagatgggaagtataaagccttctccacctgtggctctcacctggcagttgtttgcttattttatggaacagggcttgtagggtacctcagttcagctgtgttaccatcccccaggaagagtatggtggcttcagtgatgtacactgtggtcacccccatgctgaaccccttcatctacagcctgaggaacaaggacattcaaagtgccctgtgcaggctgcatggcagaatcatcaaatctcatcatctccatcctttttgttatatgggatagaaatggcagcaaaatttaacacctaggcctgcaaattctgcctccttggtcacattattttggttgcttgatggctttcattcctctctgggtttcgtatgtgaatattgcttgctttgttttgtctttaattgcaatgggtgagtattctggtatcctttgttcatcatacacatcatgaatgattccaatatacctagacagcctcctttagtatctgtgcaatgaccttgatatccaggtgcaatcacaatcttttctgatagacttgaaatcctcacttaactttgtcaagaggtttttggaaactgcaactttaaaaaaaaagcgcagcaggtcctgaaataagttcattttgttcaatgttgtttagttttaattttggtgagaaatgaataaattggtttcatggttcatcgttttgcttgaattgtggtttctaattttctgtggaggatgttaagtgaggacttatcgtacttcgtatttacctccctttctacagttcctgtgtaatttctgtccaaatcgcatctaggaaatcactttaggcagcttacgtatgatgatgtctatcaatggtcctcacatttggttttattgaaatcacctggggacctcacaaatactgaggcctgggtgtcattaccaaaatttacttggacctgtgtgggttgaggaattttaaaagcaccagaaatagttcaggtgatgatgtttctaaagggacggagctacaatgggtaagttacaaaagaatgtagcaccaggcaacgtgattcattcaaatatcttcttaaaacgcattattgttcagcactgtagaaatttacattatggccgggcgcggtggctcacacctgtaatcccaatactttgggaggctgaggtgggcagatcgcctgaggtcaggagttggagtccagcctggacaacatagtgaaaccccatctttactaaaaatacaaaaattagccaggcatggtggtgcgtgcctataatcccagctcctcgggaggctgaggcaggagaatcacttgaatccaggaggcagaggttgcagtgggctgagatagtgccattgcaccacagcctgggctacagagggagactccatctcaaaaaaaaaaaaaaaaaaaggaaaaaaggaaaagaaaaagaaagaaagaaattaacattatgttgtttttttaccactataatttttattgtacatttattcagcatatatttatacacatacagttttttctcctctttcactcttgtgcatacatagaaagggaaatagaaaagaataacatggtaacagtatcactgtagcttcacattcagagactaatttttgaaatttgctatagttttagtttttataaacaaaatgtgatatatatatatacacacaatggaatataattcaaccataaaatgcgtcacatcctgtcatttgcagcagcgtaaatggaaagtgaaataagccaggcacagaacaataagtattgcatattctcactcatgtgtaagagctagcatgtgagtcccatggcattagagagaagagtggtggttaccagaggctgagaagggtgtgtgagtgggtgtgggggatgaagagagtttggttaatggacacaaacatacaatgagatagaaggaataagttctaatatttggtagcacagtagggtaagtatagttaaaaataatttattatatatttcttttttttttgagttttgcttagtcacccaggctggaatgcaggggcatgatctcagctcactgcaacctccacctcctgggttcaaccgattctcctgcctcagcctcctgagtagctgggattacaggcgccagcctccacgcccagctaatttttgtatttttagtagagaggacgtttcaccctgttggccaggctggtctcaaactcctgacctcaagtgacccatccgccttggcctcccgaagtgctgagattacaggtgtgagccaccttgcccatttcttacatatttcaaaatagccagaagagatttgaaatatttccaagaaaaagaaattataaatgtttggagtgatggatattctaaatatccataattacacattgcatgcttatatcaaaataccacgtgtactctataaatatatgcaattattacatatcaataaaaaattgatggctattttaaatggaacttttgaaaattaaattataactgttttagtgtatagaaatagagtttttttttttggcataaagaacttcatggctgggcgcggtgatcatgaggtcaagagattgagaccatcctggtcaacatggtgaaacccaatctctactaaaaatacaaaaattagctacacgtggtggtgcttgcctgtaatcccagctactcgggaggctgaggcaggagaatcacttagacccgggaggctgaggttgcagtgagccgagatcgtgccactgcactccagcctgagcgacagagctagactccgtctcaaacaaaacaaaacaaaacaaaaaaaacttcatgcagtcacgcaatatacccatgtaacttaaattcagcctaaagttgtctccttacgttttttttttttttttttttgagacggagtctcgctctgtcgcccaggctggaggacagtggcccgatctccgcccactgcaagctccgcctctccggttcacaccattctcctgcctcagcctcccgagtagctgggactacaggcgcctgccaccacgcccggctaattttttgtatttttagtagagacggggtttcaccgtgttagccaggatggtctcgatctcctaacctcgcgatccgcccaccttgacctcccaaagtgctgggattacaggcgtgagccaccgcgccctgccctccttacgtattttaagttcagcctgaaagtttctccatgcatatgaactgtaacctacctggatgtttaaacagattgtaccctatgcctgagccaattacctgtttttgagccatcaaagctggccagcctttcaaaccgtattcaaattcgtcgaacgccgagaggtaacccatccagctgtttgtgtacttcacttccattcttttgtacgtcacttttctttttctgtccataaattttcttcccctaaatggctgtactggagcctctctgaacctattctggttgggggttacccgatttgcgaatcggtatttgctcaattaaactctattaaatttgacccggcgtgggggctcatgcctgtaatcccagcgctttgggaggccaaggcgggtggatcacttgaggtcaggagttcaagaccagcctggccaacatggtgaatccccgtctctactaaaaatacaaaaaaaaaaaaattagccggatgtggtggtgggcacctgtaatcccagctactcaggaggctgaggcaggggaatcgcttgaactcaggaggtggagtttgcagtgagccgagatgacagacaccactgcactccagcctgggggacgaaaccagactctgtctcaaaaaaagaataaaaaataaaacaaaaaaacccctctattaaatttaatttgtctaaggcttttcttgtaacacaacaaaactgcacatgtactttctgaatctaaaataaaataaaatggccgggcatggtggctcacgcctgtaatcccagcactttgggaggctgaggcaggcagaccacttgaggtcaggagttcgagaccagcctggtcaacagctcctaatgtcacaggggtgtacacactgtaatattattcacaatatcctaaagggatgttactactaatgtcacaatgcatgttcaccctatgatattatctgtaatatcctagggggatgttactgctaatgtcacagggggtgtataccttgtaatattatttgtaatatcctagaaaaatgttactcctcatgtcacagggggtatacactctatgatattattcataatatcctagggcgacattgctcctgttgtcacagtgggtgtacgccccgtgatattactcataatatcccaggaaaatgttactcctaatatcacttagggggtgtacgcaatgtcacaggggatgtacaccatgtgtactcctaatgttacttctaatgtcacttggggtgtacagaatgtcacagggggtgtactcctaatgtcataggcaatgtactcctaatgtcatagggaatgtactcctaatgtcacagggggtgtacacaatgtcacagggggtgtaaattgtcacagggtgtgtacattgtcacaggcggtgtacacaatgtcacagggtgtgtacaccatgtgtacacaatatcacagggagtgtacaccatgtgtacaccatgtcgcagggactgtataccatgtgtgcacactccctgtgatattattcataatattctatggggatgttacttctaatattaaatgtgatattcaccatcactattctagaaggatgttacttctaacatcacagggtgtgtacaccatatgtgtacacaccctgtgatattacacataatatcttagagggatgcttcttttaatttcacagggtgtgcacaccatgtgtacacaccctgtgatattattcataatagcctagggggatgttactcctaatgtcacaaaggaagtatcccatttatgtacaagtcctgtgatattattcctaatatcctagggggatgttgcttctaatatcacatggagtgtacagcatctgcgtacaccttctgtgatattattcataatatcctatagggatgttacccctaatgacataaaatgtgtacaccatgtgtgtaaaccacctgtgatattactcataatattctagtgggatattaattttaatgtacacaaagggtgtacaaaatgtcactggctgtacatcttgtgatattatttgtaatatcttaaaaggatgttactcctaatgtcacaggtggtgtaaattccttggtattatttgtaatctcctaggaagatattacttccaacatcacagtagaagtatgtacatggtacaccctctgaattgtttgtaatatcttagggagatataattcctaatatcacagtgggtgtaccccatgtgtgtataccctgtgatattattcataatctccagggtaaatattacttgtaatataacagagagtgtacactctgtgatactgttcataatattttaggaacatattgcttctaatatcacagtgggtatacacaatgtgtgtacactctattataatattccttatattttaggaatataaatgtcacagtggctgcacacgatattattcataatatccttggagtgtgttactattaatatcacagtggttgtacactctgtgatattattctttttatactagggggatgttactcctaatgtcacagggggtgtacgccctgtgatattatttgtaatatcctattggaatgttactactaatgtcacaatgcatgtacaccctgtgatattagttgtaatatcctagggggatgttactcctaatgtcacaggttgtgcttgccctgtgatattatttgtaatattctaggcgtatgttactcctaatgtcatagtgggtgtacactctttaatattattcataatatcctacggggatgttactccgaatgtcacagagtgtgtacaccctgtgatattatttgtaatatcctaggaagatgttaatcctaatgtcacagggggtgtacaccatgtctgtaaaccttctgtaatattctacagggatgttactcataatattacagggggtgttcaccatgtgtgtacaccccctatgatattattcataatatcctagaaggatgttacacctgatgtcacagggggtaaacaccatgtgtgtacacaccctgtgatattattcataatatcttagggggatgttactcctaattttacagaatgtgtaaaccatgtgtatccacctcctgtgatattatttgtaatatcctaggggggtgttacttctactgtcacagggtgagtacatcatgtgtgtacaaccactgtgatattatttttaatatcctagggggatattgttcctaatgtcacatggaatgtgcaccatgtgtctacaccttctgtaatattattcgtaatatcctaggaagatgttaatctttatgccacagggggtgtacaccatgtgtgtataccccttgtgttattatttccaatatcctagtgggatgttacttttaatgtcacaaagggtgtacaccttgtgatattactcataatatcctagaaaaacgttactcttaatgttacaggaagtgtaaccctttgaaattattcataatattctagggtgatattactttaaatatcacagcgggtgtacatacaccatgtgtctacacccttgatattattcataatatccagggtacatattttttctaatatcaatgagggtgtacaccctgtgatatttttcataatattttagggagatattgcttctaatatcactgtgaggatacaccatgtgtgtacactctctgatattattccgtatgtcctagaaagatattactcctgatatcacagtgagtgtaccccatgtgtgtccaccctgtgatattattcataatatcaagagtaaacattacatctaatatcacagagagtgtggaccctgtgatatttctcaaaatattgtagggagatactgcttctaatatcacagtgggtacacaccatatgtgttcattctgtgatattattccttatatcctagggagatattactcctaatatcacagagggtgtacacccagcgacattattcgtaatatcctaggaggatgttactcctaaggtcacagtgggtatacaccctgtgatattattcataatattctaggaagatgttacttttaaagtcacagggcatgtacaccctttgatatcattcgtaatatcctaggcagatataactcctaatattatagcgggtgtaccccatgtgtgtacacccttgatattactcataatatccagggtaaatattcattctaatatcacagagggtgtacatcctgtgatatttttcataatatttttggagatattgcttctaatatcgcagtgggtgtaccccatgtgcgtacactctgtggtattattttttatatcctagggagatattacccctaatatcacagtgggtgtgagaggttacagcgtgctggcagtcctcacagccctcgctcgctctcagcgactcctctgcctgggcttccactttggcggcacttgaggagcccttcagcccaccgctgcactgtgggagcccctttctgggctggccaaggcgggagccggctccctcagcttggtgggaagtgtggagggaaaggcgcgagcgggaaccggggctgcgcgcggcgcttgcgggcccgctggagttccgggtgggcgtggccttggcgggccccgcactcggagcagcaggccggcctgccggccctgggcaatgaggggcttagcacccgggccagcggctgtggagggtgtactgggtcccccagcagtgccagcccgccggcgctgcgctcgatttctcaccgggccttagctgccttcccgcggggcagggctcgggacctgcagcccgccatgcctgagcctcccacccactccatgggctcctgtgcggccggagcctccccaatgagcgctgtcccctgctccacggcgcccagtcccatcgaccacccaagggctgaggagtgcgggcgcacagcgcaggactggcaggcagctccacctgcagccccggtgcaggatccactgggtgaagccagctgggctcctgagtctggtggggacgtggagaacctctatgtctagctcagggatcgtaaatacaccagtcagcacactgtgtctagctcagggttttcgaatacaccaacggacactctatatctgactactctggtggggccttggagaacctttgtgttgacactctgtatctagctaatctggtggggacgtggagaaactttgtgtctagctcagggattgtaaaggcaccaatcagtgccctgtcaaaacagaccactcggctctaccaatcagcaagatgtgggtggggccagatgagagaataaaagcaggctgcccgagccagcagtagcaaccctttccggtcctcttccaaactgtgggagttttgttctttcgctctttgggtacacactgcttttatgagctgtaacactcaccgcgaaggtctgcagcttcactcctgaagccagggagaccagagcccaccgggaggaacgaacaactccagacgcgctgccttaagagctgtaacactcaccgcgagggtccgcggcttcattcttgaagtcagtgagaccaagaacccaccaattccggacacaggtgtacatccttttatattattcgtatttgaccttgctgccttttcttttcttttcttttttttttttttgagatggagtcttgctctatcgcacaggctggagtgcagtggcgcgattttggcttactgcaagctccgcctcccggattcacgccattctcctgcctcagcctcccgagtagctggggttacaggcgcccaccaacatacccggctaatttttttgtatttttagtagagacagggtttcaccgtgttagccaggatggtctcgatcatcctgacctcgtgatccgcccacttcggcctcccaaagtgctgggattacaggtgtgagccactgcgcccggccccttgctgccttttctaactcacactacggaaggaatggaacagataataagaaaatgagattagactattctgcagtgcagctgccgcagggcacttttaatttccctgttaggctgtagatgaaggggttcagcatgggagtaaccaccgtgtacatcactgaggccactgcaccttttctgggataagaggacatgtctgaactgaggtcccctccaaagcctgttccataaaataagcaaacaactgacaggtgagagccacaggtggagaaggctttatacttcccacctgatgatgaaaccctcagaatggaggaaacaattttatagtaagagaaaaggtccccgaaatgggaagaaaaccaaatatggcagcaaggaaatacatgactatgtcattggtgaaggtgtcacaacaggcaagggtgggggagttgagaagggtcacagaagaaattgggaatttccacatccttgaagcaggtaatttgtaaggcaatccaattgtgcagctgggagtctaaaagactgagaaaaaaagacaacaaaactaggaagccacagaaacatgggttcatgatgactggataatccagagggtgacagatgtccacaaaccggtcataagccatcacactcagaagcatgtcttccatgcatccaaaaacggcaaaaagagatacctgagtcaggcagcccgcataggagatgactctgctgtgagactggatgtccacaatcatcttggagactatggtggaggggaaaccgatgccagccaaggacaggttggagaggaatctggctatttcccggtttccatttaatattggagttacagagaatgtcttaattcacttctattagcccttgcattggattggcctttaatgtgccagagacttatgtttgatgcttgtttcagtgactctccgggtctaagtattttgtccaaatgaatatacaatggtatattccttacttattgaactttagttatttgataactgatacatcactgaaatacaagacattctcagaaggtggcaattaacgtgttgaccagggtggcagtcatctgaaggctggaaggtagaggatcaacttccaacctcactcacaaggttgttaccaggattcggttgctctgaaacattagacagaaaattccctcaatttcttgcattaagggtctctgcataaagcagctgaccacatggcatttggcttccatcaatgcaaagcaagatggggcagcaaaataaaagctgaggtccttcgttctattctcagagtgacatcacatcacttcttccacactctcgtagttgggaatcagtcaccaggtgcatctcacactaaataggagcagattgcccaagggtatgaaaaccaggaggtgggatgtccttgggaacatctcagatgctgctcatcacacaggccccattttctgccaggactttgggctccaaggacatcaagaaccaggtctgtttcctctgttttctttttctttctttttttctttttgtgagatggagtcttgctctgtcacccaggctgaagtgcagtggcacaatcggctcactgcaacctctgcctcctgggttcaagccattctcctgcctcagcttccccagtaactggaattacaggtgtgcaccaccacgcccagctaatttttgtattttagtagaaatggggtttcacatgttggacaggctgatcttgaactcctgacctcgtgatccgcccaccttggcctcccaaagtgctgggaatacaggcgtgagccaccgcgcccggccctcagtttcctctgttttctagcataggatccaacacaccacaatatctcaacatgattcagtggagacggagaacttcctctgtgctgggtccttctgtggaccccaccatactgctcctggacatgcagtgcaatgtagcccccttctgtagctgaatttaggcaatgtccaggggttttgatttctgctcacttgaaaggctgaagtagcttcagaatataagtttcttttatttatttactttttaagatgaagtctcactctgtcacccaggctggagtgcagaggcatgatctcagctcactgtaacctctgcctatggggttcaagccattctcctgcctcagcctcccacatagctgaaactacaggtatgtgccacaacgcccggctaatttttgtatttttagtagagatggggtttcaccatcttggccaggctggtctcaatctccttaactcgggtgattcacccaactaggcctcccaaaatgctggcattacagtcatgagtcactgcacccggtccagaatatagcttctatagtatcattgtgtgttcccagctcttgagcactctaataaaaggtgttttctggctgcctgggttttttctaatagatcacgtgagatgcacgtgaagagtggtctgttgccatcttctgcattttatcaatggagctccctggctgagaaatatctactctaaagaaatgagatttatggcctggcgcgatggctcatgcctgtagtcccagcactttgggaggccaaggcaggcggatcgtctgcgatcaggagttcgagatcagcctggccaacgtagtaaaaccccgtctctactaaatatacaaaaaaaaaaaaattagccaggcatgattgtggtcgactgaagtcccaactatttgagaggctgaggcaggagaatcccttgaaccccggaggcggaggttgcagtaagtcgagatcgcaccactgcactccagcctgggcgacagagtgagactccgaaaaaaaaaaaaaaagaaatgagatttgtctttagtggacataaagaacactttcatatacaccagatgaaattggatatggatgaaaggatgttattgacctgtggtgtgtaaataaatgacagtgtttttgagggagaccagatggcaggtgtatagaggtaaatagggaaagaagtctatgatttgagacacatagaatgacagcacattggaaaaaagaatatacttattttttgagacagaatcttcctctgtcacccaggctggagtgcaatggtacaatcacagctcagtgtcacctcgaactcctgggctcaagcaatcctccaaacttcaccctctagaatagctaggactacaggaatgtgccaccacacccagctaattttttatttatttttatttattttattgagatagagtctctctctgttgcccaggctggagtgcagtggcacgatcccggctcactgcaacctccgcctcccaggttcaagcgattctcctgcctcagcctcctgagtagctgggactacaggcgtgtacccccatgcccagctaatttttgtgtttttagtagcgacatggccaggctggtctccaactcttggcctcaagtgatccacccaccttggccttctaaagtactgggattacaggcgtgagccactgcacctagcttgtaatactgttcttgccagtacatttgactatatcccctcaaacagcctctcagttaagcaattatcgctctacagataaaatattaatcattcgatagaaatatggtttatatcataccctgagccatgcagcttataacatcattactaatatattctggaaatatgcacataaaattaaattctttaaatgtgatactagaagctaccatttgatgggaaactactctgactggttcatgacacaagatatacaatcggctgggcacagtgcctcacgcctgtaatcccagcactttgggaggccaaggcgggtggatcatgaggtcaggagttcaataccagcctggccaggatggtgaaaccccatctctattaaaaatacaaaaaaattaactaggagtggtggtgtaatcccagctactcgggaggctgaggcagagagttgcttgaacccgggaggcagaggttgcagtgagtcgagatcatgccactgcactccagcctgggtgacagaggaagactccatctcaaaaaaaataaaaataaaataaaataataataataaaaagatatgcaatcattgcatggccttgggggaaaaaaaggctattgcacttactttgctgcagagaaatctgaggctcagaaaggagctgtgagttgtgatatcaccaggacaccagtgtcattgctcagacactcctagacacaaggacgctgttgaggtatatgggatccgcttgtgatgtttatgatgaacaaatgataccagaatactcacccgttccaactaaagacccaaaaaaggaagcaatattcatacatgaaacatggagagaaacgaaagcaaacaagcaacaaaaataatgtgaccaaagagacagaatttgcaaatagacatgtttgattttgcaatatatttcagcccccactacagaaaggatggaacagataatgagattagactgttctgctgtgcagcctccacagggcacttttaatgtccctgtttctcaggctgtagatgaaggggttcagcatagggatgaccacagtgtacatcactgaggtgaccgcacccttcctggggaaagaggacgcagctgaactgaggtaggctccaagtcctgttccataaaataagcaaacaactgccaggtgagagccacatgtggagaaggctttatacttcccatctgatgatggaattcttagaatggaggagacaattttatagtaagacaaaaggatccctgagatgggaagaaaaccaaatataacactatctaaatacatgaatatgttattgatgacactgtcagaacaggcaaggttgagaagttgagatggctcacagaaaaaattaaagatttccacattcttgaagcaggtgaattgtaacacaatctgattgtgcagctgggagttcaacaggctaagaataaaagacaccaaaactaagaagacacagagatggggattcatgatgactgggtagcgtagggggtgacaaatggccacaaactggtcataggccatcacagtcaggaccatgtcattcatacacacaaaatagataaagacatctgcatcaggcagccctcataggagatgattctgctgtgagattgcatatcaacaatcatcttagggatggtggcagaggtgagtccgatgtcagccaaggacaagttggagaggaagaagtacatgggggtgtggaggtgggagtcacagctgacggccaggatgatgagcaggttccccagcaccgtgatcaggtacatggacaggaacagcccaacgaggacgggctgcagttctggatcctctgagagtcccaggaagagaaattctaagacacctgtgagattctgcgagtctgtgtaacttggacaccttgagaagaaaagagggttgaaaaaataaaagacataaatcagcacttactgctgtgtgcatattttggatacaagcaattcacaagtaacattttcacacttgaagaccatacaccctcagcaatatttctccattgtgagaaacccaaaaatctcagaattattacatgatttacttttttgctattcaactctttctgtatatacctacttcagagaaaatccactgaagaatgttaaaagatcaaggacgtaatatataacaaatccatgattgcaataaaacatggcctagtcttttcagaaaaaaaaaataagaaatgtacttttctaagaaaaaaaaagcccaatttaattaaaagaaattaagaagcagtgaaatataattcattttattctgacactgtgctacaaactccttggatgtagaatatttataaacactatacaagagctaggagcacattatctagaaactaaaacagacctgctagttcataatcagaagacctttttacatgccaattacttttcatattttttatcattcttaggttttctgacatcatttcttcacacaagtaaatgcacactcaaatataggagctatgtttccaaatttatttaatatatagctcttgtccttggctcatgttttctttgggttttgataagaaagctttgttgcacataatcataggccttcagcaaccacacagctatcgataatgtgtaatgcatgtgtcatcactaaataataatgaagtttaataacattttctctttattttattttagcctggaatgatgcgaaactcaaaattgtgtctaagcacgagaatcaggtctacctgccctcttctctttgtgcctttcttcattctgatatagctacaaaaatctctgcgatggtatttaggtacttgaacattgcagatgctattaaatggaattctaaggtccctgtgtctgtgacatagacataaacaggtgttatcttgtatctcattttattagacattcctaaagggatgaggggacagacaagaaaccaccaactgtgttgaggtcacactaatcacagccaattttttgtgatccaaggaagggcctatccagtatttaacggggaactttatttttgatgcctcctttgggactggcaagatataggctctgggggatcagaaacgaaagagatgcaaacattcctctcataatactcagcacttacttagataggtgcaaatgtcaaatgtcctgtcagggatgtagggaactgtaacttcaggccagaggacatttcagttcaattgtatgaagattaagcttaaaatagtaataagaatatcaaaattcactttggttttatgtatccatcacatagagatcagcagagaacacccatgatctgttgaatcatcactcactgtagttgggtcaactagaaatcagctcagatgatagtgctgagtctcagagacacagagatctcaccccgtgtcacagagttcagggaaatgggcagattcaaaactaaatggtccgtctctgaggcccaggcactacccttcttcattattgttcagctctcagaaagtcttaagcagaggtgggaggtcttaactacaggcacttctggggtgcatttagaaacgagttccagcttcctgaatagaaatggagccaagaccctgattttatgtctcctttgaggaggtggagagctgcaaggaaagccaggaacgggggaaagggagagatgcaccctgaatgatcctgtgccagttctttctgggatctttgatgtgatctcagctgccctttctatacgtgatactatgaatgtagcaccctctagtctagctgtggtctaccaggaaccccccaagggaagggcacagtgagcaagggcatctgccaggactgacagggatttgagagggcaggttggactcagagagaggcctggcccaatgccatgtgtctggacttagacggctcctttcctattctataattaagaataatgcggcaggtataattcagggaagactaagcagatgaaagagaacaggcttcatagaacatcaagaagtcctcagtaaaagttcatgatagcctggtgaccatcgtcttcctcctcatcctcatcatcaccttcataatccttttggcatgcttagggaacacgctattacgagtgagatgtctttgggaagttgaaccagtgtggaagaaaagttaaactttgaatgagatttctgagaccaatcacaacccagaacataaactccacggtcgtctgagctgacattttgcacgtgggtttcctcccatctgccaccccactgtcctgtttgtcctgaggatgaggaaacaaggctcccgaccatccctcagcactcactgagctgcgcttcccctctgctgggccatgaccacggagagcaggtccgccgtcctccctgtgtggtgcacgatggaggctcaggctccgtcctcaggactggcaggaagacagggtcagacatgagcctcctgatgcagacgacaggtgtggagcccactggactggaagctcacactgcagggctggaggcacaggctgagtatttactgtcctatggccttgggggctcaaggcacagagctcctcattagccaaactggcccaagttccccagtctttaaggacttcctcattaatgcaagataaagcagaaaaaatgaacgtccccaggaacttttgggctcttcctctaatgaggagaaagcttgtgttcatcgttcacttctttcatttctttttctttttcaaggatgcatcttttttaagttttcatatttttatcctggcaaaatgtaccacattcaatataaaaattataaatataggtttatacaaaatggtaagtaacattttaccatttatcctcttcaaaatggtaaccaataccattttaaccacttttcactgtacagtttgctggcattaagtacatccacagtgttgtgcaaccaccaccgtcatgcatcaatatatttctctttcagaacagaaactcctgactgcaagcaatccacccagcttggcttcccgaagtgctggcattacaggcgtgagccactgcacccggccattctgtatgctcattgtctatttgtttatcttctttagagaaatgtctattctagtcctcttgatggagcagttaactcccattaatatcaagcaatggattgttcaatacttcattatgcaaaaataaataataggtttttttttattttaaaacatcaagcaacagggccacagagtggcagttaaaaaaaaaaaaagctactgttgtttcaaccttcaatcggaacacagagatccccatattcttgtcatcagaagctactcatggagtccagcccacactcaagaagaggagatgacactcgggcatgaaaactaggagggagggacccttggaagggtcttaggagccacccgcaggcttcatcttctatcagggttttgtactctaagcacagcaacactctgcagatatccagcataattcccaattcatcacaccactatgatcacaaccaaaaaattccaaaaaaaaaaaaatgtctggaaggaaaaactggcacttgggcagaacttcttctacattgagtacccacctgaccaagcagtgcacagaagcctccctggattctcttacccctgtagagtcctgccattgacatcaggccaaccagcagccactctatgcctgagaacaacaaatctcccctgcagcttccgatttccactcagttatcaagggatcatcttgccggtccacaatgtgtcatcattgtttttctttgtgtttacagcttggggactgcccttcccattagtgcatttccctgacattgcccaagatattatgggtatttcaagtttcaagatttcagtaatgcaccgcataaggatgtttcaatgaccagactacatacacagtggtggttccgtaagattttaagggagctgaaaaatccctatagcctagtgatgtcttagccattgtggcatcataatgatagcagtggctgctgccatcaggccagctgcagcagagaaggggcagctggggctgcaaactccatggagccagagggagccccgcccaccccttatgagctggagctggagctccccaggtgctgttgcagccgcccaatccatggatgcagacccaggcctccggctccacagagcaggcaggagcctgtgctctcctgggtggggctacagctgccccatctggctgtggttccgagcctccctgtgctcttggaggcgggcaggagcagacaggatctgctctcccgggtgcagctgtagccgactgacccacagctgcagacctggggctcccactccacggagcaggaaggagccagggacaagtgggagccccaaccctcccgagttggcatggcaggagctcccagggtgtagctgccactgccctcccaggcacaggacccaggcatatctgcagcctccaccctcgggggcctgggaaggaccctccaatcactgcaggcttggcagtgtctgctcccacagcctggcctctttcccttctggtgcctcctccagtctcggagaggggttgggaccagctctggggccataaatggcagtgggatacagagttctggataaaagggggcaggtccccagtaagaccctaccttcaggccatggaaggcctgaaggctagacaccatgatgccagtctcacggatggagtggggacttgtagtgcctcctctggcccacccatggctgcccgtggagcgatcagcatgtgcttcctcccctctgaggtccataaaagccccgggctcagccagagcagggcagaggatggagagatgaccagacgacctgttagcagggaggagccaccctctccagggccccatctcagctgagagctgaacacttcaccagaagacctgcctacagagagcagttacccactgtgggtctcctctaagctgttgtaacactcaataaagctcctcttcatcttgttcaccctccagttgcctgcgtacctcattcttcctggatgcaagacaagaattcaggcaaaggcaccactggccacagagctttccagacagaaaagtgaaaccctaaagatcccataacaataacacaatgtattccccacgtttgtgatgatgcttgtgtaaacgaacctactgcactgccagttacataatactgtagcacatataattctaggtagtatgtaatgcttgacagtcatcataaatgaccatgttagtgatttatgtatttactatactatacttttaatcattattttagagtgttgtccttctattttttattattttttaatttattttttattatacttttaagctttagggtacatgtgcaaaatgtgcaagtttgttacatatatatacatgtgccatgttggtgtgctgcacccattaactaatcatttacattaggtatatctcctaatgctattcctccccgctccccccatcccatgacaggccccagtgtgtgctgttccccatcctgtgtccaagtgttctcattgttcaatttccacctgtgagtgagaacatgcagtgtttggtttcctgtccttgcaatagtttgctcagaatgatggtttccagcttcattcatgttcctacaaaggacatgaactcatccttttttatggctgcatagtatttcatggtgtatatgtgccacgttttcttaatccagtctatcattcatgtcgtccttctatttttatattttaaaaaattaactggaaacagcctcaggcaggtccttcaggaggtattttggaagaaggcattgttgtgatagatgacagctccatgagtggcattgagaccttccagtgggacaagatgtggaggtgggagatgttatattcatgctcctgaccctgtgtatgcctgggctaatgtgtgttcgtgtctttattttttggtgcttttttttttgtagggactgtgtctcgctatgtggaccaggcaggtctcaaactcctggccacaagtgaatctcttcctggctctccaaaagtactgggattacaggcgtgaatcacagctcctggctatgtgtcatagtttttaacagaaaaaaattttaactaaaaaaaaaaaatcttaatagaaaaaagttatagaataaggatagaaagaaaataacttttgtaacagctgtacaatctgtgttttaagctaagtgttattacaaaacagtcaaaagccttttttaaaaagtgaaaatgttacagtaagcaaggttaattgattcttgaaaacagaaaaatattttttacaaatttagtgtagcctaagtgtacagtgtttctaaagtcttataatgatgtacagtaatgtcctaggccttcacattcaccccctactcaacgactcacccagatcaacttccagtcctgcaagctccattcatggtaagtaccctaaacaggtggaacttcttttgtcttttagactgtacctttaaactatattttaactgtaccttttctatgtctagatacacaaataccattgcactactattgcctacagtattcagcacagtgacatgctgtgtgggtttgtagcctaggagcagtaggtcatagcgtagaaactaggtgtgtagtgggctctactatcaagttagtcttgattcctctttcttttttatttgtatttttgcgttttgttttgttttgttttgttttgcttttgagacagagtcttgctttgtcaccaggcttgtagtgcagcggcgccatctcggctcactgcaacctccacctcccaagttcaagtgattctcctgcctcagccccccaagtagctgggattacaggcgtccaccaccacacccaggtaattttttttgtatttttagtagagatagggtttcaacatattggccagcatgatctcaatttcttgacctcgtgatctgcccacctcggcctcccaaagtactgggattacaggtgtgagccactgctccgggcctgattcctctttcaatatcattaccttctctgtgatctcacacgttttgagtactataaaggaaagtctttgtagcaatcagactcagctattctcttccaaattaaacatatgcaagtcatcaagacagtgagctttgatctctttgcagtccaaagtcctttgcagagtgtcatgttattgatttaaactagcaagacattgggtaattccatcgccaaaaccatatatcagttggtagaaatttgctatgaagtgtggaaagtcattgatcgtgtcaaagaaaaattacatcacatggggtcaagctggcaaagaagactttattcaagacaattgcaataagggtcaagactattgccttagggaggccaggcaatgtggctcacgcctgtaatgccagcactttgggaggccgaggcagatggatcacaaggtcaagagattgagaccattctggccaacatggtgaaaccctgtctctactaaaaatacaaaaattagctgggcatggtggcggatgcctgtagtcccagctactcaggaggctgaggcaggagaatcacttgaacccatgaggcagaggttgcagtgagtcaagattgcaccactgcactctagctcggcgacagagggatgctccgtctcaaaaaaaaaaaaaaaaaaaaaagactattgcattagggaaaagagattgaactcaactccactgaaacaaaaatgagaggattttcaaatgctggagtgagctaatggaaaagcccaggaagacgttagggaggaggttgtccagtgtgatttggccatgtgtgttcactaattgtcacttacagaaggctcctaccctcccaaagaagctgaaagatagggatgttgtttttattaataattacatttcaaagggatggcaaccaggtccttgagaaagagattcctgggttatacaactgggatgtggcagggcgtgatggctcacacctgtaatcccagcactttgggaggccaaagtgggatgatcatttgagccaaggaattcaagaccagcctgggcaacgtagcaagaccccatctctaccaggaaaaaaaaattagccaggcatggtggcctgtatgcctgtaatcccagctgcttgggagtctgaggcaagaggatcacttgagcctaggagttcgaggctgcaatgagctatgatcacgccactgcactccagcctaggtgacagagtgacagacagtctcataaaaaaaaaaaaggcatgagacttaaaaatgatttatctccctttcaagggagcagataaataatttgcaatcacaagttttttaaagtaaatgctctaaaaaaaggtcagggctctgtagtcaggaagaaacctagctcgttttgtaaagctgaggaaaacgttaaagccatcttagtccattgaaaatcagaattttcaaaactgttgttccaactcttgaatatttaaacatagcaccgttaactgtcatagtaaaacagaggtgttcttgttgttgtcattgtcgttgttgttgttttgagatgaagtctcactctgtcgtccaggctggggtgcagtggcgcaatctcactgcattggatgatgatttgcagcatcatccaaagacacatatccgattgcttcttgggacatccctgcataatctctccttacaccaaggtattcactgcaaccaccgcctcccaggttcaagtgattctcctgcctcagcctcctgagtagctggaactacaggtgcacgctaccacacctagctaacttttgtatttttagtagagatggggtttcaccatattgaccagcctagttttgaactcctgacttccagtgatctgcctacctcagcctcccaaagtgctgggattataggcgtaagccaccgcgcccagcctaaaacagaggttgtatatttttttttactagtatcttgagttccaagctcaaatgacaacactaaaagtgagaggcaaggtaggctatcaggcagcaagtctaaaatggtaaacagggtccatgacccacagagatttgtggtgatggcaacagattgtaggtgagcagacatcgagtgtattgtttgacctacatatccaaaaatatcatgatcaagtcagcagaagtcagatgtcagccaccaccattgaaaatcatgattcttctactagttttcttgttttttaatgatcactgcacatttaatctttaaatatgtacattaggccagacgcggtggtttatgcctgtaatcccagcactttgggaggccgaggcgggcagatcatgatggcaaaagatggagaccatcctggccaacatggtgaaacctcgtctgtactaaaaatacaaaaattagctgggcgtggtggtgggcgcctgtagtcccagctactcaggaggctgaggcagggaaatagcttgaacccaggaggcagaagttgcagtgagccaagatcgcgccactgcactccagcctggcaacagagtaagactccgtcaaaaaaaaaaaaaaaaaaaaaaggacattaaacatcatatttgggttttatttaaaaacttcatttttgtgccttgtttcataatacatacttatagtttaagtgtttttctattgtaaaatgacatgactttcttaaggaccacatggtgtaatagcaaattgaacttgtcttctaccagttttcatactcaagcctgttttcagatttagagcattgaaattgaagagttgctgggctcatctttggatgtcagtatatggcctctaaatagtcatattcctcgaggaccacatggtggcaagttgattacatcagacactttgcaccccagggtaggcagcaattcatctttactgagatgaatatttatttatgtacttacgtttgcctttcctgcccgcagtgccttggcaaacagcatcatccaaagacatattatccaatttcttgttggaatatccctccataatctcaccttacaccaaggtacttgttttatggtggaggagatattaaaatgaacatttaggaagagatccagtagtcctaatggatttgcagcatctgaagctgctcagcactatatacctagattctggcaactctgtgattcagttctcactctcctgaatcataagctagtgctcgctgctggcaccatatttgaagatgtttctacattcagccaggtgctgttactgtctaaactcctgttttgggcctctgtgaattcacctgcaaaattaggcaactagacaaaatacagcacgatcagacctaaaattctgggcagatggtttgtctgtttctggtgatacattttcttttttctttcttttttttttttgagatggagttttgttcttgttgcccaggctggcgtgcagtggcgctatctcgcctcaccacaacctctgcctcccaggttcaagccattctcctgcctcagcctcctgagtagctgagattacaggtgcgggccaccacacccagctaattttgtatttttagtagagatggggtttcgccatgttagtcaggctggtctcaaactcctgacctcaggtgatccacccaccttggcctcccaaattgctgtgattacaggtgtgaaccaccgtacccggcctttttttttttttttaagcagggtctctttctgtctctgaggctagagtgcagtggcaccatcacggcttactacatgctcaaactcttgggctcaagtgatcttcctgcctcagcctcccaagtggctgggactataggtgaacactacaatagctggcttttttttttttttttttgagactcttgacctcaggtgatccacccacctcgacctcccaaattgctgggattacaggtgtgagccaccacgcctggcctattttttttttttttttttgtaaagaaagggtctccctattttctttattttagaggctatcaaagcttattttagaaatgtactaaacaaacatatggagaaatgttcaacctcactaataaggaaataaattatttacccatcaatctattttaagtttgaacatacaacatgatctgataacattctaagattgcagatttaactctatggggcaagaatttattttcacttctgtatcccaggcacctagaacagcctggcacactataaggtccaataaatactgtcaaaggattattgagaaaggtttaagaaaagattgtcaaatgaatgaacttgataagagctagctagcaatggttaatggtaaaatgaactatttcataacttttatccaacaatgtctgagttaagtacttaaacttgttgtattaaccctcaggaatcaacacaaacaaatctacaaacaccaagctgaggtgcaatcgtggaaaatgtaagaggagatgaaagggtagaactgaaggataacagagaagtctctttgtataagactcatacaaagtactcacagtactcacaaggtaatgttgaccaaaggcagagaaacagagaaacaaattccatgagattaagaggcagaattttttttttgagacattttactatctttgttgcccaaactggtcttgaacttctggtctcaagtgatcttcctgtctcagcctcccaaagcactgggattacaggtgtgagccactgcgcctggcctacaggcagaatttctttagttgctgttgtttttgagacagggtctggctctattgcccaggctagagtgcagtggcatgatctcgactcactgaagcctcagcctcctggactcaagggatcctcccacctcagcctcctgagtagctgggaccacaggtacaccaccatgcctggctaaattttatattttttttgtagagacagggtcttgctatgttgcccaggctggtccagaatttctttagctcactgctgctacctctgccaactcagaagcccaggaccaatgtccccgtcattgagcatacagcattctcccaagcagtgtttctagggtcctcttgatgtccctgttccgcaagcaatagatgaaggggttcagcatgggggtgaccacagtgtacatgaccgaggccaccatgccccaccaggaagaggacgatgcattggaactaagatacacaccaaggcctgtcccatagaataaagaaaccacaaacagatgagatccacaggtagaaaaggctttgtgtttcccatctgtggatgagattctcaggatgtaggagacaatttgggtgtaggagaaaaggatccctgagaagggcacaaagtccagaaggccggccaccacgtagagcaggatgtaattgacatgtgtgtctgagcaggtaagcctgaggacctgagcaagctcacagtaaaagtgctgaatgactcaactggtgcagaaggacacccgcagcaccaacagactctggatcagggagtatgacaagctgaggaaccaggacacaagaaccagcaggccacagaggcaggggttcctggtgacacagtagtacagggggtgacagatggccacataccggtcataggccatcacggtgaggagaaatgtgtccatgcctccaaaaaccatgaaaaacatacatctgggcgatgcagtctgcatagctgatggcattgctctgcacctggatgttcaccagcatcttggggactgcggtggaggtgaaaccgatgtcagccagggacagattggagaggaagaagtacctgggggtgtggaggtgggagtcagagctgatggccaggatgatgagcaggttccccagaacggtgaccaggtacatggacagaaacagtgcaaagagcaactgttgatcctctaggtcttgggaaaatcccaggagtaaaaattctgaaactcttgtttgatttcccaagtccatgttgctgacacatcagctagacagttaaggaagggaagaaacatgaaatagatgctgaacaggctccaaaatctctctgcttttttatttcttgaggtgaataattggatacaaaagctttaaaatagcaaaacttaggaatcctacattctgtcatttgttataggcaacatttcataacgttgactaacccctgttcattggcctctcagaggcttacccattccctttttctctgctttagaatcatcaaatctaccaagagcaactttagaccttagagataaaatggtctgcacctgctctaacacatataaggttcagtgaacttaagaaaaggtcagggtcatcttccttgtctaagacacaactgagactgaagaaggtcagacaactatgtctgagcagtgagaaaatatgaaagcagagataatagctagacaaaatattgcaagatgagtggatttaggttttcaaggaaggaaagaggaagggagggagggaaggaggaaggaagggaaggaaggaaagaaggaaggaaggaaaggaagaaaggaaggaaggaaggaaggaaggaaggaaggaaggaaggaaggaaggaagggttacttgttgccttaagtcccacttggaattatggtggcagccaaattctgattcaaataggtcatgacattaccagtaataacattcatcttaagaagctgaccgcacattaaaaactttctaccttagaaccagggtttcaaaattagagaccagaaagatacagtcatttgacacttatatgattctctttttccatccacataataaatatgtcctaatctgtttctagtgtctagtgttggtgcacaattttttttgttgttgttgggtttttgtttgttttcttttcttttgagacagagtcttgagctgtcacccaggctggagagttcagtggcgcaatctcggctcactataacctctgcctcccgggttcaaacaattctcctgcctcagcctcctgagtagctgggattacaggtgtgcaccaccatgcccagctagtttttgtaaaaatacaaaactaactagctagttttttacaaaaactagttagttttaccatgttggccaggctggtcttcaactcccaacctcaggtgatctgcccacctcggcctcccaaagtgctgggattacaggcatgagccacagcacgtggcctggtgcataatttttgttgagccgtgctgggaagtacagaagaattgaactaggttgacaactaggttgtcagtcactgaaaaagtgctaacagccattctgcaagagggtcttctttgggccaggctaagtgttagctgttggggatacaaagattaatgatgtggtcttttttttcttatggttccaccttccagaagatggattcagaaacagatcattgtaacacagtgaattaagtgctaaaataaaacgatgtacagagtggagtacagagaggaaccctcaatccagcctggagtaatgcattcagggaaggagtcctggaggaaggaatacctgggcaaggagttacccaggtgaatggttgcacaggggcatttctggcagagatataagcaagggaataagcctagaagcaagaagcagcatgggacagagttctcttagccctttgctgctgcttaagtacaaagtgttagatagaaacgatgaggatgatgttggagaggtgggcagggatgacatgtctaagaactttgaaaagtataatccataaaggatggggctgtgaaggaacggcaatcaaaggagtaacatgataggaattgcaattctccctggggcctggagggaaagatggatttagggcaggcaaaactaaggataagggaacagggttggggattcttcatatcattggaattgaggggaacaactcaggaatatttttgcagaagaaatacaaaggccaggagaggtaaaggaatgaggtcaatgtcttgctaacaatctcagcttaaggatgagacttgaccttcaagtgaaatgaagggaattatggaaaagaatcctgcaggtttcaatgcttccctcgtgttccccagaggatacgatgtcaagaggagactggatgttgggcttgcctgagcccttcactttccctcactcacccatcgtaccctagttgttatacaccatggccttccattccagggaacacagacgcttgtctcttgaaggtgtctacttagaatcatggataagggtaaagaaggatggggaaggataagtctttctggagaggcaggagatgtttccaagcaagtgagggtcacagagaagaattcagagaggcttgatctaggctgagggcctctgaagttcttgggtcaggtagtaggtgaaaagaactagaagtgaccaggacttcactgcaaggcacctacagctcctactgaaacctgcaggattcttttccataattcccttcatttcacttgaagtcaagtctcgtccttaagctgagattgttagcaagacattgacctcattcctttacctctcctggcctttgtttttcttctgcaaaaatattcctgagttgttcccctcaattccaatgatatgaggaatccccaaccctgtttccttgtccttagttttgcctgccctaaatccatctttccctccaggccccagggagaattgcaattcctatcatgtaccttggagcatccatttgtacaatgcagattggtcactccaagaccacacagagtgatccagggcagcgctaagatatcaaacagtgccccaggccaacaaagagtagcccttcctataacctccatcagtcatctacccaagtaatatacaggcaaagttaaagctcgctatacaatggctatttaagcaagtagtctagccattctcccttccaagaaatcagcctcaacagccccttctccgtggacatcacagggtttctcctgccctatgattaacaagtcaatgcctttcccctcaatcatctcttttccctatttccctcaacacttactgagctatgaaggtttgacaatgtggacccaccacaggagccaccttgtgtccagaattggtgggttcttggtctcactgacttcaagaatgaagccgcagaccctcgcggtgagtgttacagctcttaagtggcgcgtctggagtttgttccttctgatgttcggatgtgttcggagtttcttccttctggtgggtccatggtctcgctggctcaggagtgaagctgcagaccttcactgtgagtgttacagctcttaaagcagcgcgtttggagttgttcgttcctcccagtaggctcgtggtctcgctggcttcaggagtgaagctgcagaccttcgcggtgagtgttacagctcataaaagcagcgtggacccaaagagtaagcagtagtaagatttattgcaaagagcaaaagaacaaagcttccatagcttggaaggggatccgagcgaggtgccactgctggctggggcaacctgcttttattctggtatctggccccacccacatcctgctgattggtagagccagtggtctgttttgacagggtgctgattggtgcctttacaacccctaagctagacacaaaggttgtccacgtccccactaaattaactagatacagagtgtccacacaaaggttctccaaggccccaccagagtagccagatacagagtgtcaattggtgcattcacaaaccctgagctagacatagggtgctgattggtgtgtttacaaaccttgagctagatacagagtgccgattggtgtatttacaatccctgagctagacatgaaggttctccaaggccccaccagagtagctagatacagagtgtccattggtgcattcacagaccctgagctagacacagggtgctgattggtgtatttacaatccctgagctagacataggggttctccatatctccaccagactcaggagcccagctggcttcacccagtggatcccgcactggggctgcaggtggagctgcctgccagtcccggtgccgtgcgcccgcactcctcagcccttgggtggtcgatgggactgggagccgcggagcagagggtggcgctcgtcggggaggcgcgggccgcacaggagcccatggagggggtgggaggctcaggcatggcgggctgcaggtcccaagccctgccccgtgggaaggcagctaaggcccggtgagaaatcgagcgcagcgccggcgggctggcactgctgggggacccagtacaccctccacagccgctggcccggttgctaagcccctcattgcccgggccgggcagggcaggccggctgctcggagtgcggggcccgccaaggccacgcccacccggaactccagccgggcccgcaagcgccgcgcgcagccccggttgccgctcgcgcctttccctccacacctccctgcaagctgagggagccggctccggccttggcctgcccagaaaggggctcccacagtgcagcggtgggctgaagggctcctcaagtgccgccaaagtgggagcccaggcagaggagtcgcggagagtgagcgagggctgtgaggactgccagcacgctgtcacctctcaacctcccctgaatcttgttgtctcgtggaagtaggcgatgaagacagaagctctgccccccaaaagagcagggagacagagcccggcaggtggtacgcggcctggatgatttctcctggagaacgcatgagtgtcttggaccttgcgcctgggggcctgggtgactgtaagtagatgaattgcatgttgggccctggggtggtctatcccctctgaagcttgttagacaaattggtcaatggcgtattcattccctgatcagtttggttcctcatgggcagggactacacaggaagaggtctctgaacggccaattccttattcttgggagactatcaatggggccagctgtgactcccgtctcctgtacctctcctttgggaagaatcactctagtctactttgaatcacctttggtgacaactgtcagcaatttttttttttttgagacagaatctcgctctgtcacccagcctgaagtacagtggcgaaatcttggctcattgcaatgtctacctcccaggttaagcgattcccctgcctcagcctcccaagtggctaggattacaggcgcgtgccaccatgcccggctaacttttgtatttttagtagagatggggtttcaccgtgctggcagtctgatcttgaactcctgccttcaagtgatctgcccatcttggcctcccaaagtgctggaattacagtcgtgagccaccacacctgggcagcattttctgacttgaggtttcctaattaggcagatagttgggtagcaaagggtcccaggattcacaaaaaggtagtggttctcaaaagggagcccgcaccagatgacctcaaggacttgtttaaacacagattgctagaacccactttcaagtttctgtcccagtaggtctaaatttgagtcataatttgcatttgggacacattctagatgtgatggtccccaggacaatctttttgggaaccagtgtcctggggcagtgcttcacaaattgagatttatcaaaggtataaagaggggatcttgtgaacagatagcttcctaccctatcccagacttaccttgccaagatctccaaaggaagacctaagagtctactttaaaaaaaaaatactatagttttttgtttttgtttttgagacagggtcttgctgtgtcaccacggtggagtgcagtggtgtgatcacagctcactgcagctttaacttcctggggtcaagcaatcctcccacaacagcctcctgagtagctgggactacaggagtgcaccaacatgcccagctagtttttacttttctttttttttttttttttttttttttagagacagggtttcaccatgctaccctgggggatcccagggtaatagcttcccactctatcccagacttaccgtgtcaatatctccaagggaggacctaagaatctactttttaaaaaaaattttaacagttggccgggcacggaggctcacgcctgtaatcccagcagtttgggaggccgaggcgggtgaatcatgaggtcaggagtttgagaccagcctggccaacatggtgaaaccccgtctctactaaaaatacaaaaattagccaggcgtggtggcacacgcctgtaatcctagctactcaggaagttgaggaaacagaattgcttgaacctgggaggcggaggttgcaatgagctgagatcgcaccattgctctctgcctgagggacagagtgagactctgtctcagaaaaaaaaaaattacaacagttttatttattaaagtttttattaatctaaaataaataaataataaagtttttattaatttttttttctttttgagacaaggtctcactcttgttaaggctggagtgcagtggcgcaatctcagctaactgcagcctcaaattcccgagcttaaattatcctctcacctcagccttccaagtagctgggagtacaggctgcgcccccatgccccactaattttttttatttttttgtagagacagggcatcactatgttgcccagactgtctagaatttgtggcctcacgtaattcttctgtctcagcctcccaaagtgctggaattacaggcatgagctaccacacctggcctttattaatatttttattgtggtaaaatatgtataacaaaattgaccattttaagtgtaagactcagcagcacattgccgggcacgatggctcatgcctgtaatcccagcactttgggaggctgaggtgggtaggtcacctgaggttgggagtttgagaccagcctaaccaacatggtgaaatcacgtttctactaaaaaaaaagtatacaaaaattagccaggcctggtggtgtgcacctataatcccagctactagggagggtgaggcaggagaatcgcttaaacccgggaggcggaggttgtagtgagccgagatcacgacactgcactccagcctgggcgacagagtgagactccatctcaaaaaaaaaaaaaaaaaggagactcagtggcactaggtacattcacaatggtgtgcaccattactactatccatcttccattctttttcatcatttctgaatggaaaccctatacgcatgaaataatacctcccattctcctctgcttccaggccctggcaacctctattgctccttctgtgtctatgaattccctgttcatgtttcctcatataagtggaatcatacaatatttgtcattttgcgtctggtttatttcacttagcataatgttttcaaggttcaaccatattgcttttatttatttatttacttttaatagcaatgtgggtcttactatgttgcccaggttggtctcaaactcctggcctcatgcaatcctcccgccttggcctcccaaagtgctgggattacaaacgtgagctatcatgcccagctccatgttgcttttgggatcaaatgcaaacaatcattactgaggccaatgtcaaagagctttttccctatatatattttttgagaaggtttatggcttcatgtcttacatttaagtttttcgtgcattttcaattgatttttgtatataagagtcaaatttcttcttttttttctgttttgcatacggatatccagttttcacgccaccatttactgaaaagactatcctttccccattgggtattcttagtgtctttgttgaaaaatagttgactgcacatacatggagttatttctaggctctctattgtgttccattggtctatgtgtctgctattatggcactaacatactgttttgattcagtagttttgtaatatagcaatgaaatcatgaaatgtgatgcctccaccttaggtcctctttttaaaatttttaatcaacaaataataattgtatatatttaaggggtactatgtgttttgttatatgtatacattatggaatgatgaaataaagctaattaacatacccatcacctcacatactagacaggaacagaaagataaacactgtgtgatcaggagctaagctatgactacatgaagacataagaatgatacatgggactctggggacttgggggaaagggtgggaggggtgagggataaaagactacacattggttaacagtgtacactgctcgggtgatgggtacaccaaaatctcagaaatcaccgctaaagaacttattcatgtaaccaaacaccacttgttccccaaaaacctattgaaataaaaatgataataaatactgcatgatctcactgatatgtggaatcaaaaaagtcaaactctcggcagcagagagtagaatggttgataccacgggctggaggatggggtggagaaatgggaagatgttggtcaaagggtgcaaaatttcagttagacaggaagaaaatttctggacattgattgtactgtatggtgactatagttaataataatgtattgtacatttgaaaattcctcagccgtggtggctcatatcatgcctatgatcccagcactttgggaggctgaggcggaaggatcacttgaatccaggtcttccagcctggacaacatagcaagaccccatctctacaaaaaaaaaaaaaagtaaaaaattagtcagttatggtggtgtgtgcctgtagtcctagccacttgggtggatcacttaagcccagaagttccaggctgcagtgagctataatcacaccactgcattccagcctgggcgacagagtgagaccctgtctcaaaataataataaacactaattttcaaatattcaccataatcccatcaacaattgtatttccatatcctcgcaatctaactatagcccctgttaggactccattaccagtcttggaaccagagtacatgaggctcccatgtcaaggagtcccagaaaagtcttttctctacctcctgaccattttatgcacttgtgtgaatatcaccttgtgttaccagccacgtttctactaaagaaagtatacaaaagttagccaggtgtggtgtgcacctgtaatcccagctactcaggaggctgaagcaggagagtcacttgaacccaggaggcagaggttgtagtgagctgagatcatgccactgcactccagcctgggtgacggagcaagactctgtctcaaaaataataataataatagtaataataataactctttgggaggccgagacgggtggatcacaaggttaggagatcgagaccatcctggccaacatggtgaaaccctgtctctactaaaaatacaaaaattagctgggtgtggtggcatgcgcctgtaatcccagctactcgggaggctgagacaggagaatcccttgaacctgggaggtggaggttgcagtgagccgagctcgcgccactgcactccagcctggagacagagtgagactccatctcaaaaaaataattaattaaataaaataaaaataaaataagaacttaggatagtggaagaagtgtttctgatcccacagaaaggatatagtccctgcttccaccccagccatgctagtatcacttcctatatgcatttctggtgatactgagtggctttaatttacagccaatgttgataatccatctgcccaaggctaaacatagactggttcttattccttattttttaacacctttcagatttttacatattagccaaaaattttatgattgaggaagataacagaaacacaactaattgagaagcttctctgggtactttgggcctcttagagtggggtgctgggttaagtcttatcgcatttcaaaagacttagtgtggatagtgaatttgaagacagaactgaccagaatactgtgtcccacatatcctggtagcagaacacttagatatctgtactcattcattttacaaatgtttgagtcactatgaggtgtctgtcaccataaaggaaaggaagcaatccaggactagtcataaatttgagttggaagtacagtgtcatttataagggtggaacaggtatgataagggtagcttgctaaagaaaagttctatttggggcatgttattttgaagatgattatcagccatgcaaatatatgtttggagctcagaggaggagtctgagccatgatttgaatttgggagttgttagccaatgtgtgtatcagttagctattgctccaatgtgctgcctaacaaatgatcacaaaaatcccagaggcaaaacatcaagcatgttatttagctcacaaatctgggagttgatctgcattgggctccactgagccatttagctactcttgtgtctgtagcagtgccagaagtgctaaagttagcaaaccaaactacacaagcatgtttaaagcctctgctcatattttactgcttaacgttccattgcccaaaacaagtcacatagcaaagggcatgaatatacaaggagtgaggaaatgggggcattaattttctagaatgtggcagtgaaagtcaaagtacttggaccatgggatgaaaccaccttctgaaggagaaagaaaaaaaggatctattgaaagaaaggtcacaaacaggcatggtggcttacatctgtaaacctagtattttgagaggccaaggtgggcagatcacttgagcctaggatctcaagacgagcctgggcaacatggtgaaaccccgtctctacaaaaaaaaaaaaaaatagctgggtatggtggtgtgtgcctgtagtcacagctattcaggaggctgaggcaagtgggtcacttgagtccaggaggtcgaggctgcagtgagctgcgattttatagcacctttcagaatagttttcaacttttataagacaatataaacctaatacaaaacagacaagtatattatgataaaagaaatcacaggacaaccttctcatgaacatagacacagaaatacttttttaaaagtaacattgaatctagcaaaaatgaaaaggctaataaaccatatccaagtgtggtttattccagtaatagatgttgttttaccatatgaaaatcaaggaatatataattcaccttattaacagatttaagaatttttttttccagacctctcaggattgacaaggatttcttaaagactctgataaagactctctttatctagagaaggcactagataaaatctaatgtccattcatgatttttacaaaacaatcttgacaatccaagaataaaacagaattcccttaatttgataaaggttatttataaaaaacttctaggtagtatcatacttaatggtgaaatattaaacacatttccctaagttcagaaacaaggcaaagatattcacattcatttctgttcattattctaaagaaataaggcaagaaaaataagcaaaaaataaagtttagacgttaggtaagactttcttttattggtattaacaggattatatatatatagaaaatccaaaatccacaaagtattggaataaataattgaatttataaatgtcaccagctataaagtcaatatacaaaaagatattgcaattctacgtgctagccaaaaacattgaaaaacaaattaaaaatacaaagcaaaatatactagaaataaattaaacaaatcaagatttctacaatgaaaactataaaacactcttgagaaaagttaaagacaacctaggtaaatggacaattataccatattcatcaactggaaaactcgatattgtaaagatgtcaattatcctcaggttattttataaaaccaatgcaattacaggcatagtaccaaaaattcatttgtgaaaattaatcctgagattccaaaattaatttaggaaacatggggaacagagaaggcaagacaatcttaaagaataaaaaagttggaaggctttcactaccagatttccaaaaatattacaaagcaacataaattaagatagtatggtattgatgcaagaaaagacaaatgaaccaagaggcagagatcacctcagcaaagaggaaaccatggtctctttgataaatctatatacacacaccttgatcctacctcacacgctacaaaaaattattcaaagtagatcacagacctacataaaaaaacaataaagaatctagaaggaaacataggagagtagattcattatcttggtccaggcaaataattcttaaacaggtgtcagatctcaagttgatctttatgctcattaaagattaagcagcaatctttttttttttttttttttgacacggagtctcattctgttgcccaggctggagtgcactggcacaatcttggctacctgcaactccacctcctgggttcaagtgattctcctgccccagcctcctgagtagctgagattataggcacaggccaccacgcctggctaatttttttagtacagacagggtttcaccatgttggccaggctggtcttaaactcctgacctcaggtgatccgcccacctcggcctcccaaagtgctgggattataggcatgagccactgtgcctggccaagcagcaatctttagcaatctaaacacatgttaatggatgacacctgacctttctaaaatgctatctaggaactacctaaccctggctgagttcccagacttcacagttcccacttgctgctaagaccagcataacagctaacattaccactgcttttagatcctacctgcccactccttcctcctcccctctgcatatgccccaaaactgccaggactctatgattcagtcagtgcagactctaatccagtttctggataagaacaggcactaaccctaaacaaatgagagtattacattccccaggccagtgactagagtacagtgggcaagtgagccaatcagagccaacgagattcaattctgatcatcatattggaaccactcaaaaagacaatcactcttttctccctgagactttaagttgggaagaaagtagccagagtttctggggccatctatgaagagacaacctgcttggaagaaacactaatgcaggaggatgcacagccaagacagggagacagaattcaactagataacatttttttagccccaggatttagccatgtctgaagctcgttatacccaaggactttttagtaataaattatttaaaccaacaaattccctttaaagagtgaaaagacaagacagagattgggaaatgttatctgtaatgtatgtatatataatatacatattttatgtatatatgtaatatatgatacatggtttatacatatctatgcatgtgtacctagatatagatatacatacatacaataaaggacaagtaaccagaaggaaacctttcaatttttttttttttttaaaaaggaaccataagtctgggtgcagtggctcacgcctataatcccagcactttgggaggccgaggtgggcagatcacctgaggtcaggagttcaagaccaacctggccaacatggtgaaaccccgtctctactaaaaaatacaaaaattagccaggtgtggtggcacacgcctgtaatcccagctactcaggaggctgagacaggagaatcacttgaacccaggaagcggagattgcagtgagcaagatcacgccactgcactccaacctgggcacaagagtccgtctcaaaaaaaaaaaaaaagaaaagaaatcataaatggatgaaatgtttcaacaggtgccctcaaaaaaaaaaaaaatccaaatagccaataagcacatcgaaaagtactcgaaatcattacacatcaggtaaatgcacactgtctgctggatgactataatcagaaagagctggacaggtgtgtgaaacaactggaactttcatgcattgttttggggattattcgtggaatcgatattttttgaaaactgcaatacctaccaaaactaaatttaaagtctaccctatgattcagtaaattcattcctgagcatatagcacataccaagataaataagcccatacatctatcaaaagaacaattaaaagtcaaaccacacattatgttgagcaaaagaagtcaaaacacataactgtatatattgtattttaacatttggatgaaaatcaagaacaagcacaccaagtcaattatagtaagagtcaaaattgtggttgccctgtggagtaattatcactgagaaagaggatgaaggaacttcctaaagtcttggaaatgttctgtttaccaggacatgtacatacatgaaatgtcattaagctgtacattgaagattagcacacttcatgcatgttagtatatgtataataaaataaaaagtgattatggggaaatagtagagttatacttttaaagagaaaatataataggagggaaatatcacagtagtagattatacttttaaagggaaaatataatactgtagctaaaggtacctgaagcaattcatcttcttacatttaaaaaaaaaaaaaaagcagtaaaatctttcctgtttaaaggtgtcaagtataaatcttcctccattaaaacaggatgataccctgtggatgcttacctcaattaccaagggtaacttccctcactctccacagctcttgcttttgagacttgcgaacgtatttttccccatgaatagcatgacatgatgcgattggactgtgtaagaaagactgcaacataagcaaaatggcaatgccagagcttgctagaaaatccaagaagctgtatctggtgatagctttagagatgctgccttggaagacactgaggtcaagcaagcatttaatgtttggttttttatttcgttttgttttgtttttgagaaagggtctcactctatcactcaggctggagtgcagtggcatgatcatagttcactgcagcctcaaactcctgggctcaagtgatcctccagcctcagctccctgagtagctgggaccacaggtatgcaccatcacgtccagctataacattcagttttgagcaaatattgatcaatgagtccaacagtcagaaaaatgagctgaaaactagaggtcaccaggcctttatacatctgtctctctgtctgatggccccactaaacatagcataacagctttttcttcccttatgccttccaaatctcgtacaaactcttattttagacaagtctaacctagaactggagaaaaaagtgattctgggaaatgtagttaatgtaacacaatttttacactcaaaacactggatccaattcccagccacgagcaaggacaaagaataaaatataaaaatagtatattaaattaatttctgctgaaattactcactagacaataaaagcttttaatagtaaaaatttatcatctcagaaactctaacgtctcttagcaaaaaagaataggaagaaaaatattgagtgggcaagttccattatctgccatgtagactaaaaacaaaacatcaacaaaaatcaatatttggtttttggtttgtcaatattatattggtttgtcaatattataacgactacccatttaaagaacaatgaacattaattagaaaccacttttttaaaaaagaccactgctgcctatacagaaaaaatatttcgtgtcctccatgatccaaaagattttgtaatggaaatcatatttacatcagaaccaaaattaaagcacctcatactaaaaagtatgtggctagagctgaaaaggtaaatttatcaccttcaatgttcctatcagaaaacactggtaatcaacgagccagcattctactttaaggatgaggcactgatcttcatttctagtagagattttcttatacataataagcaatgttcataaaggctttagcacatgacttacatacacagggtttctctaaagtgtcctcaaatcttcaaaacgatgagcaacaatttcctactttcttacattcatagggtgtctccacagtatgagatctcacatgttgcctaggatctgaagctttgcagacattcccatattccttacatttatatgttttctctagtgtgagttttcacatgccttcgaaagtaggcaggacaaacaaaggctttcccacattccttacattcatagggtttctctccagtgtggcttctcacatgccttcgaaaggatgagggacaactgaaagcttttccacattccagacattcaaagggtttctctccagtgtgcattcttgcatgtacagtaaggtatgaagaatgacgaaatgctttcccacattccttacattcatagggtttttccccagtgtgcgttctcatgtggatcctaagggctgagggataaataaaggctttcccacatttcttacattcatagggtttctctccagtgtgagttctgatatgtactgtaaggtgggaggaactaataaaggctttcccacattctttacattcatacggcttctctccgctgtgagttcttaggtgttcggtgagggatgaggaacgactaaaggtcttcccacactccttacattcatactgtatctttccagtgtgatctctcacatgtgctctaaaggacgagggacaactaaaggccttcccacattccttacattcatagggtttctctcgactttgatttttcacatgtgtattaagggaagtgggaaggtagaaggcctttccacattccagacattcatacggtttttctccagtgtgttttctcatatggatacttaaggaggagggacaattgtaggctttcccacattccttacatttatagggtttctctccagtatgtgtcctcccatgtacagtgagttttgaggactcgctgaaggccttcccacactctttacattcataaggcttctctccagtgtgaattcttatatgtattataaggtgagaggaagagctaaaggccttcccacattccttacattcatatggcttatctccactgtgaattcttttgtgtttggagagtgaggaggaacaactgaaggccttcccacattccttacattcataaggcttatctccactgtgaattcttttgtgttctgtgagcgatgaggaacaactaaaacctttcccacattctttacattcatagtttgtctttccgatgtgaatcttcatatgtgccctaaagaatgaggaacagctgaaggctttggtacattccttacattcatagggcttctcttcagtgggggttttcatatgcttcttgaaacaagcaagaaaatggaaggccttcccacattccttgcactgatagggtttgcttccagtatgagacctgatgtgactcttaagggatgaatgatccacgaaggcctttccacactcatggcattcacaggattttacttcagtatttctcttgagtgaatcaagatttggaacttggctgaaagtctgtccatcttgattttcttcataacattcatagatgttctctaccatatgatttcttttaaaaataaaagacacattattagtaataaatttctaccaatttcagtgaatgtatatgttttctgcccttctgtcaagtttaagctgaaagttttcacagagggctctacgacagccaatactgtcactgagttattgactcacgggatttttctgataattgtttacaactgaagtatgtgtcaaacattcaaaatcccggtctcatttgtggaaaaaattaactcatgaaaattctttctcaaaccacaatctttgatctaggcttatttatatatacatatttcttaaatttcatgactttaattttaagattctctcctgaggcactttctctttctcacgaatggcactcacctcaaatgtctctcatggcttttgttctgataatcaataccacaggactcctggttttcatgtaaactggagaaccaggaatcattccttttgaatcttactattttctgttcattggatattttttctccacaaatatcttgtgaagcaactgattcattagttttaagttgagtctcaaaacctgaaacgaaaaaaagtgaaagcttccatgagccaaggacttttagcagagtgactatttcaggactttggtattaataggcacaagggtcaaaatggtaagcaattaactaagaaataattttatgaagattgaaactaacataactaatatagtattaggagaacaaaacagaaattggataaaatgcacatgaccaaatgccaacttacaaagaggaaacgtggaaggtctttgccaagaacaaggaaaatgcgagaggactgataaaaagtcaaaatagtcatctgagctatctgtggaagatgagcttcctcatataaaacaaagtttgtttttgttttttactttaagtttattttttcccccaaccaaaacagtttctcccaagggttcttgccttcccggtgctctcccataaagatgccctggataagttctctcttcactgtctgcaggtcctcctcttgttcccactgggagatcagatggggtgtgtgtagcggataccctgcacaagcagaaaggcatatcacgagggaaaataatgaagaatcactaacatttccatgaaacagaaacaaaactttagtcttctgatattccaaaaatggacaactgtgagtttaactgcaacaaaatgtcaaatttatttatttttttttttaaaaaaaggagaggtggcaggttgggtgcggtgactcacgcctgtaatcccagcactttgggagactgaggcaggcagatcacgaggtcaggggttcgagactagcctggccaacatgatgaaaccctgtctctactaaaaatacaaaaattagcagggtgtggtggagcacacctgtaatccaagctagtcaggagtctgaggcaggagaattgcttgaacccgggaggcggaggttgcagtgagctgagatcgtgccactgcactcccgcccgggcgacagagcgagactctatctcaaaaaaaaaaaaaaaggagaggtggcaggaggaagcagcttctgacatacagaactgatctaatgttcacacctaaacctcaatatcattacaagctggtcagacagtcacaactgggacattttgttctcctatagaatataaataatctcacaaaatactaatcttggataaagttactctgaaatcatgataaaatgaaacaaaacaaggttacctcataattttgtctaaagactttatgccacccacaacatactcaataatagagtattattgaataatactgtcagcaaccagcaatactatccactttctgtcagcaaccaatctaaaatgactgcctgtgtcactaggctgaacaacgtcccctcaaaatttatgttcaaatggatcaacagaaaagcacagtgggttcagaaacagagccacaccaatacagtcagctgaccttgacaaaatagcaaaggcaatacaatggagaaaagctaagtctttcccacaattggtactggaacaactggacatccacaagcaaaaaaataaatctagacacaggccttagacccttcacaaaagttaacgcaaaatgggtcacagaccttactgtaaaatgcaaagctagaaaactcctagaagataacaggagaaaaatctaaatgaccttctgtttggcaatgacattttaaattttttttcttttttttgagacggagtctcgctctgtcgcccaggcgggagtgcagtgccacaatctcagctcactgcaagctctgcctcctgggttcacgccattctcctgcctcagcctcctgagtagctgggaccacaggtgcctgccaccacacctggctaattttttgtatttttagtagagacggggttacaccgtgttagccaggatggtctcgatctcctgacctcgtgattcacccgcctcggcctcccaaagtgctgggattacaggcgtcagccaccatgcctggcctgacatttttaattttttttttaagagacagggtctcactttatcacccaggctgtagtagtggtgtgatcatagctcactgcagcctcaaactcctggactcaagtgatcctccagcctccacctcccaagtaactgggactaccagcgcgtgccccccacaccctggcaatgatattttagataataatgctaaagcatgatccataaaacaaagaatcaataattgagcttcattaacattaaaaatttctgccctctgaaagacaatgtcaacagaatggaaagataagccacagcctgggagaaaatatttgcaaaaaacatatctgagaaggaactgttatcaaaaatatacaaagactgtagcagatatcatacagaaaaaaacaaacaaaatattcaaagaactcttaaaactcaacaatgtttaaaaaaaaaaaagacaaaaaaatgagccaaagacctttacagacacctcaccaaagaacatatacagatggcaaataagcatatgaaaagatgctcaacatcataagtcatcagggaaatgcaaattaaaacaaggcaccactacacacctgttagaatggccaaaatcctgaacattcacaacaacaaatgctggtgaggatgaggagcaacaggaactctcattcattgctggctggaatgctcgctctgtcgcccaggctggagtgcagtggtgtgatctcagctcactgcaagctctgcctcccaggttcacaccattctcctgcctcagcctcccgagtagctgggactacaggtgcccgccaacacacccggctaattttttgtatttttagtacagatggagtttcaccctgttagccaggatggtctcgatctcctgacctcgtgatccacccgcctcggcctcccaaagtactaggattacaggcatgagccaccgcgcccggctggcagtttcttataaaattaaacatcctcttaccataaaatccagcaactgaattgcactccttttacccaaaggagttgaaaacttaagtccacataaaaacctgcacaccaatgttcatagtagctttatttgtaactgccaaaacgtgtaagcaaccaagaagtccttcagtaggtgaatggataaaccgtggtacatccagacaatagaatattagtcagaggtacaaagaaatgagctctcaagctatgaaaagacatggaggaatcttaaatgtatattgctaagtgaaagaagccaatctgaaaaggctacatactgcatgattccaactatatgacattttgcagaaggcaacatcattatggagacagaaagatcagtagttgccaagatttaagagggagggaaggagggatgaattgatagagcacacaggatttttacagcagtgaaactattctgtatgatattataatggtggatacatgtcattatatattcttccaaactcatagaatgtacaataccaagagtgaaccctaatgtaaatgatggactctgggcaatgatgacgtgtcaatgtagcttcatcagttataacaaatttaccactctggtgggggatgttgttattagaggaggctatgcatgtgggagccagaggttatacgggaaatctctgtaccttccactcaattcagctgtgaacctaaaattgctctaaaaataataataaagcctacaaaaaaaaaagagagagagagagagagagagagaagtccacccagaacctcaaaatgttaccttatttagaaatagggtctttacagatataatcaagacaaggttatactggattaggatgggccctaaatccaatgactggtgtccttataaggagacagagacttagacacacaggcaagaaggagaaggcagagaatggaatgatgcatctgtaagtcaaggaatgccaatgattgccagcaatcaccagaagccaggaagagaaaagggagtctttcccccagagccttcagagagaacatggccctgctgatcccttgatttcagatacccagcctccagaaatgctgtgaaggaaaaaatttccgttgtttttagccaccagtgtgtgatactctgctacagaaggtctaggaaactaatacagcctgcttccatagacccatccccaaatcactcaactgaagcacaaatcctgtaataggtcttttctaacaccatcttactaggacatgtaagaggcatgtattcttgcttgctgcactgcaaaataaacccaacttgtttaactataagtgtgttctggtagtctttgggtaaaggacacagatagcagtaaaatcctcaaaatgttcaaactacaaacctcctccctgtgtcctatagtgattgctgaggtttatacccacactttcgatacttaataaacctcaaggctttcaaccacgaaaaaaagcatcagttcaatatacagatgtttattttcttttttcttttttttttttttgagatggagtttcactcttgttgcccaggctggagtgcaatggagcgatcttggctcaccgtaacctccacctcctgggttcaagccattctcctgcctcagcctcccaagtagctgggattacaagcatgcaccaccacgcctggctaattttgtgtttttagtagagacggggtttctccatgttggtcaggctggtatcgaactcctgacctcaggtgatccacccgccttagcctcccaaaatgctgggattacaggcatgagcactgcgcccggcccaggtgtttattttcatagcaaagccactagactgtaagttccttggggtcagtgaccatatctgtcttacttaccaatgtcttcccattcctcagcccaaatcctagaataaagtcaatttagtgagataaaataactttctaaacaactacatgaaagaatcttgccattcttacctagtgaggccaggttctggaagttttccagcatcacatctctgtagaggtttctctgagcaagatccagcaaagcccattcctcctgggtaaagtccacagccacatcctcaaagactactgagtcctaaaacataccacaaattctgttcagaaaggtacaattcctccaatgtgtacaagaggacagatgaggctcacaacatcgaggaaatgagagtcaattcataggaagttcagaagatcccagcatctactctagggctcagtcaacaaatctctctctctttctatccacacataattcatcactgatcaaatcctggcttatagatttaatacttctaaaacactaaattgccaggcaaattgggtcaagcctataatcccagcactttggggagccaaagcaggaggactacttgagcccaggagttcaagaccagcctaggcaacagaacatagtgagaatcagtctctactaaaatttttttaaaaaatagctgggcgtggtggcatgtgcctatggtggcagctactccggaggctgaggtgggtgggaggattgcttgagccacaaggttgaggctgcagtgagcacgaccatgccactgcactctagcctggacaaaaaaaaacaaaaacaaaaacaaaaaaacattaaatttatctccccacaatctgatgccaatgagctaggaaaaaacaaagtgtttttcctaccctcttacatagtcactcaatactgtacagaacacttctgacaccagatgtgtgggggatattttccacaaacaccaagcaattccccagtggacaccagctgggtatcctacaacttgcttctgatactatctacctggagattccacaggttggagattccacaggaggtcccactaaactgcctcccacttcagatgccaatcccaagttaaaaggctgtcaattatacttctgactggctaaaatcagggctcctactaccctctccttgagtttgattaatttgctggaacaactcacagaactcagggaaacatgtttactggtttatcaccaaggtcattacgaagtacacagataaaatagccagatgaagagatggacaggccaaggtatgctgggaaggggtgcagagattccatgccctctcctggcatgccaccctccgggaaccaccacacgtccagctatccacgagctcctcaagccagtcctttgggtttttaaggaggctccatcacaggcatggctgatttaagtcccaatcctctgatcttgcctgggtctttctgaaccagcccccattctgagtctctctaggggcttccagacaccaaccatctcatgagcacacaaaagacgctcttattgctctagagattacaagggtttttaggaactctgtcctaggaaataggatgaaaaccaaattgttttcttttttttttttttgagatggggtctcgctctgtcgcccaggctggagtgcagtggcgcgatctcggctcattgcaacctccacctccctggttcaagcaattcccctgcctcagcctcccgagtagctgggattacaggcacgtgctaccatgcccagctacttttttttgtatttttagtagagacagcgtttcaccatgttggccagactggtctcgaactcctgacctcaggcagtctgcccaccttggcctcccaaagtgctgggattgcaggcgtgagccaccgtgcccagccccaaatatgtatttcacaatatcatagatggtgaccaatgccagtcttatgatggcctagaaaagtccagaacatattgaagaaatgagaaaaatgctctggaaatgaaataatttccacattgacatcatcgattccttattacagaaataacttcacctgttactttattcccaccatagcaatcactacaacattaaacacagggtcaaatctagatgggattttaatgaataaaaatacaccgagagaaaagcagcctttcatttttttccccctcacaaaactgagaggcccaggagactgcataagcacaattttgaagccaggcccacagctggtcatactttcttgtattctaggccagtggtcagcaaactatggcacatggactatatccaagctgccacttgaatgcataaatacagttttattggaacacaataaaatgtgtttatgtactgtctatggctgcttttgcaccaaaatggcagagctgaattgcaatagaaacactacggccggccgggcacggtggctcatgcctgtaatcccagcactttgggaggccaaggcggacagatcacgaggtcaggagattgagaccatcctggccaacatggtgaaaccccatctctattaaaaatacaaagttagccgagagtggtggtgcatgcctgtagtcccagccactcgggaggctgaggcaggagaatcggttgaaccagggagtcgaaggctacagtgagccaagatggtgccactgcactccagcctggcgacagagcaagactctgtctcaaaaaaaaaaaaaaaaaaactatagccttcagtgcctaaaatactatgtggtccaatacagaaagagattgctggcttgtgccctaaaacactgagggagacctggtacaatggaaatattcttttggacaattatcaccttttacttacctgtattctatttttctgtaactcagcagtttttctttcttcctccatgtcgccttcatgaagaaaagcaggatattgagaagttagaattaaaaaaggtgacatgagaatccagacctccccaaaattcccacactcatgagcctggatgttgcagcccatcaattataagtaacaactcccctcaaaacacatacacacacacacacacacacatgcacacacccaagacacccaagtaaatataccctgctcttgtgggaaagtggaacaaccttacgtccccctagagatacaaaacagtgctctggtccttgttgatcataaagaagaggttaagagtgctattttgtaagttaactgaagactagaaaagtctggctgtcaatctgcccatgataacaaaaagtataaaatgtatcagggagtatcttccaaaacatgaataaacactccccatctcaaattcaagaaagcactgatttatatgccaggcttctgggagttccactcccgatatttcttacttctgcaccccttggctggctaacaggctttgctgctcagccctagaccactgcccctgcccccatgagctgcagggttccccaaaacctgagaaagagcatcagcctattttttttttttgagatggagtcttgctctgtcacccaggctggagtgcagtggtgtgatctcagctcactgcaacctccacctcccgggttcatgccattctcctgcctcagcctccccagtagctgggattacaggtgcacaccaccatgcctggctaatttttctgtgtttttagtagggacggtgtttcaccgtgttagccaggatggtgtcaatctcctgacttcatgatccgcctgcctcggcctcccaaagtgctgggattacaggcgtgagccaccgcgcctggccaagcatcagcctattgaattccatatgctggaggcagagaaggccgctatgctgtgatacacatgctaaatctgcctgcacagtacagtagtagcagaataagaatacttggccaagcatggtggctcacgcctgtaatcccagcactttgggaggccgaggtggatggatcacgaggtcaggagttccaaaccagcctaaccaatatggtgaaacccctcctttactaaaaatacaaaaattagccaggcgtggtggcgcaagcctgtaatcccagctactcaggaggctgaggcaggagaatcgcttgaacccgggaggcggaggttgcagcaagccgagattgcgccactgtactccagcctgggagacagagcgagactccatctcaaaaaaaaaaaaacacttgacctgtgtcagccctgatgtggtatctgcagtgctgtttcacaaatttcaaacaacgacatgttaacagttacttccactgcagtggaacaagtagcattttaaaaagccaataaaaaactgtaacattctttgctgtattagtaacaatatatgccatctggacaaccctgatgtgagaatgactttgcaaagaaatggccacattttagaatatttctcacagaagctctgcaaatcaaatattattacaaccagtttagaattatcttagaatgagtcaattaaccacatcttcaatattacccaattagacagctgctgaggcagggtatgaatgcaggcctatttgtcttcaaaacccaaacacccagtgagtacatttttgaacacataccttaaattttaattgtttttaagccccttattccctagttttaccaggatttagcctagaaccctattgggcactacagagagtggacaaatgaagcattctaatcaaatatgctgtgcgtggtagctcatgcttgtaatcccagcactttgggagaccaaggtcgggggaatcacatgaggtcaggagttcaagaccagcctggccaaaatggcgaaaccctgtctctactaaaactacaaaaatcagccgggcatggtggcgcacagctgtagtcccagctactcaggaggctgaggcaggagaattgtgtgaactcaggaggcagaggttgcagtaagccgaaatcacaccactgcactccagcctgggcaacagagccagactctgtctcaaaataaataaaataaataaataatcaaatatgttatctttgagctccttttcctaaggcctatgtcttgggcaacgatgcttcccttatagcccttacctccttcgtttcatgtttatttaggtgacatttatcctgaccctactacatgaagtcacaaggaataaggcatagaaaaataaaaaagaaaaatcctgaagcaaatgaatgttataatattttgggtaagacattaaacaaaatacatcaggtagagatacatgctatataaaaaatgtagcacattatagggataaggagacacgtaacatatttatctttagcaagtcaggacaggtaatgtggcagggtagaagcagaaaattaaaataactatttcagatcatgctggaatttcagagggtttagtatatctattatatatttataagcattatcaactcctagaggaaaaaaaatcagtactggccaggcacggtggctcacacctgtaatcccagcactttgggaggccaaggtgggtggatcacaaggtcaggagttcaagaccagcctggccaagatggtgaaacccacctctactaaaaatacaaaaaaattagctgggcatggtggcaggtgcctgtaatcgccactacttgggaggctgaggcagagaattgtttgaacccaggaggcagaggttgcagtgagccaagatcacgccactgcactccagcctgggagacacagcgagactctgtctcaaaaaaaaaaaaaaaaatcggtattaataggctagactattgatatataaagttgaataaagaccagcataaaagtttagaaagaaaatagaaaataatcttttttaaaacatagtaaacaaaatcagaaaagctaaaaaagcatcctttgcaaaaagaaaaactaatgaaactgacaaactcagctttttaaaaaaattttttaatttaatttattgtttaagacagactctttatgttcccaggttgatctcatttcctaggctcaagcgatccatctgccttagcttcccaccagctgggactacagatatgcgccactgcagccagcaacagactcagcaattttaagagcaacagggcataaacaacaacaacaaaaaaaaaatgaacaagaattaatcataattacagatatcataaggagaatatagaaaaaatttaaggaataaatatgaagatgcacaggtaattaatgaatttctagaaagtagtacaactttcaagcagtgatctaaaacctgattacacccagtaattaaagaaaaaaaaatcagcggtttaaaacacggtcaggccgggtgcagtggctcatgcctgtaattccagcactttgggaggcggagagcccatgagttcgagacctgcccgggcaacagagcgagactcctattttctaaaaagaaataggaataaagaaaggaaaaaaacctacaaacacctacagcaaacatcctatttaatggtgaaatgatagaataattccctctggaatcagaaacaagacaggatgtaaattacatgctattctgtcggacattgtactggaggtcctggcaagtgcagtaaagaaatgaaaagaaatggaaactgcaaggaataaaaagggaaaagattgaaactgacagatgaccaaattttctgtgtgaaatttaaccaatctatagacaaatgattcaaatgcatcattaatgacaaaatgcatcagttcactttcacttgaatataatgtatcaaactgatgtccacaggcagaatataatatccagagaccaaatactatctttttgtttttttgagacagtgtctcgctctgttgcccaggctggagtgcagtgatgcgatctcagctcactgcaacctctgcctcccgagtagctgggaacacaggagagcaccttttattttacttttttttttttttttttttttggtagagacgggatcttgctatgttgcccaggctggcctcaaactcctgggctcaagcgatccgcccgcctcggccgcccaaagtgctgggattacaggcgtgaaccaccgcgcttggcccaaacactacctaatgcataaagaggggacaggaggggaccgagccgaggcaaatgtcaccccgtgctcacccgacacgccgcgatccacagatcagctcacagagaacgaggctgaagcgcttgtccttgagacacgaatggcagagatgctcttcctttctggaaagagagcaaaggatgctttcggaggctgatgaactacgacattggttctccaactctcgcctgcatcagaatcaccccgatttctgtacccagaccagagttcccgattcagtgagtttgggaccagccgcggccacaggggcagctgacccgggctctctgaggaggcgccgcggcggcgggaggccccgggcgcggggtccggacaaggagtggcggggaggcagcccttagaccgccgattcccaaacccagccctcggtctcccgcggacccgacccggggcaggcagggcggggcggggcagggcaggacaggaagcgggcggaggcaaaaatgttcctcagacgcgggcggaggcgtagggtgacaaggctgtcgactcgcgcatgcgcagaagcacacttctgattcctctttcggcgctgcaaatggcgtatggggcggggcctgggaagcgggacttgaggtgaagggggtggagcaggtaggagcgggatgcaaaggagcgccaaggctggttccagccgcaagtggatgagaaatcctagtttcttcatgatttggagtaaacagagaagaaacagaaccctgaactggacttgcatgactcggcctgaggggcggaactggggctagacctaggggcgtggccttttaaatactccaaggggcggggctaaaggtggaaccagattgggagcggggcttggtagaaattcctagggggcggagacgagggctgggcggggcttaagtgacaaggcctagggatggggctaaggctagggcttcccatccaggttctcagctaccacggatacaggatgctcatcgatcgggtttctacctatcctccacgttgctacagtcctgtacacaggacacatatatttgcagctctaataggaaacagactctccttgacactcactcagtccttttgggccttttagttttccctttcattgttgtattgataacttctcctgtagagggaagccattgataattatttaaatagaacctttttcctggaaacttgctgaattctgatagctgtcagtttattatttgaaccatcaaatataaatattttctctgcatattttcattgttttaatgtgtataactcatttctttatgtgaggcaatgtctcattctatcgcctagactggagtgcagtggcgcgaccatggctcactgcagccttgacttccccagctcaagtgatggtcccatctcagccccccaagtagctgagaatacagtcgcgtaccaccccacccagctattttctttatttttttgtagagatgggatcgcactatgttgctgaagctggtctcaaactcctgagctcaagctatcctctcacctcagcctcccagagtgctaggggtacaggtgtaagccaccacacccagagtcatttctttttcttattgtttgtttagggcttcctcaactataagtcggaaagaaattaagcattcttgtcttggtcggtaatgattaccaaagttcctcagtaagctgtttacaacaggttgcacctcttatcaagttaatctttttaaaccaggtttataaagatattttatcaataattttttatgaacactatcaaatgtttatgcaacaattgagttgataacataattttgctcctcttagtttataatatgatatccatataaaatatttaattttaggcaaggcgcagtggctcatgcctgtaatcccagcactttgggaggccgaggccggtggattacctgaggtcaggtgttcaagaccagcctggctaccatggtgaaaccccatctctactaaaaatacaaaaaattagctgggcatggtggcgggtgcctgtaatcccagctactcaggaggctgaggcaaggagaatcgcttgaacctgggaggcagaggttgcagtgagctgagatcgcgccattgcactccagcctgggcgacaatagaaagactccatctcaaaaatatatatattcaattttatatatccccaatgaatctatacttttagtaaaatggtttctgagtttcctagtttgcttttaaatgtctccccaaactctaaaatataaaaatacttcctaatttacttccaaattgtactgctttttaaaacgtataattctttactgctcagggaatgtattttggtataatatgaggtagagatgtgttatataagtgaaccacaggtggcctttctgtattggtccctaggttgttcattacttcttcactgcggcttgaggtcaccttcccaatgcctgtccctggtgccctagccagctccctttcatcatctatgttttttaagtgtaaatctttttctattatgaagcattatgttctcattgtagttttttattttaaaggaaaagtataaggaaaagacaaacaacattcagaatcccagcagtgtttgaattttctgtatttcctttctgccttctttgtacgcgtgggtggcaagccacccaggtgccaaggcaagagaccgagggcacaagctgttccagtataataaagaaaatatatagaataagagtagttatactagaaatagattatagatatgattgtatatatcattaatcatttgtagcattactctttattccaatattataataatctttgttctacaatcataacctaggaaaaaccaggccatacagagataggagctgaagggacatggtgagaagtgaccagaagacaagggtgagccctctgttatgcctggacagagccaccagagggctccctggtctagcggtaatgccagcccctgggaaggagcccgttacctagcggaccttggtctagcagtagcgtcagtgcctggggaaggcacccattgcttagcagacagggaaagggagtctccctttccccgggggagttagagaagactctgctcactacctcttgcggaaagcctgacatcagtcaggcccgcccgcagccatccagaggcctaaacgtctccctgtgatgccgtgcttcagtggtcacactcctggtccactttcatgttccaccctgtacacctggttctgccttctaatcagcagtagcggaattagtgaaagtactaaagtctttgaaatgcatagaagaaataatggcgtaagctgtcctctctctctctccacctcagctgccaaacagggaagggccccctgtctggtggacacgtgactcgcgtgaccttacctatcattggagatggctcacactccttaccctccctccttgtcttgtatccaataaataacagtgcagccaggcattcggggccgctactggtctctgcaccttggtggtagtggttccccggacccagctgtctttttgtctatctctttgtcttgtgtctttatttctatgatctcttgtctccacacacgaagagaaaaacccacagacccagtagggctgcttcctacagtacgcataacagtaggtttttttattgtttgtttgtttttgactcagtctcgctctgtcgcccaggccggagtgcagtggtgcaatctcagctcattgcaaccttcacctcctgggttcaaacaatcctcctgcctcagcctcccgagtagctgggattacaggcatgtgccacaacacccggctaattctgtatttttagtagagatggagtttctccatgttggtcaggctggtctcgaactcctgacctcaggtgatccacctgccttgacctcccaaagtgctgggattacaggtgtgagccaccatgcccggccaatcagaagtaatttcaatttttcatctgccatgcaaaaaaggtgagggattgcaaaggcaatagcctctggtccttttgttacttgggcatggaaagtggggtttccttttgatctagttctagaaagtcagcgtgattggccttaggttcccttcctctagaccctattctacctcaacactgaaacttggaaaggaagcttcttcctccttccttgtcttccagcaccctacactggtaatgggtaaaagagaaatatttataaggcccatctccattatcacaaagcagaaaaaaaggacaaatttgtagcataagtaataaatctataactaggacagtggtcaaagcatgttttgccttggttttcctttactgacagaccaggtcctagcaacaccaagaattggttcatggtatccagactgcttttcctcccaatttgtggcaggtcaattctccctgacaatcacacagacaggcctgcatgacagtcacacagacagacctgcacagcacttctgttacacagacaaatttccacaaaactgccttaacattgagcaaatagttaaatctagggaaatcagtgcccagacatcaaagctagaaatgaaacacatggtcagttgaagcttcacacgggcttctccctaacctggagcaagccaaaataatacagacagtcttacattcctagtaccagcacgtgtctcaggtggacgaaatctgagatgagtcaagataacagaggcagctgtttgaatagattcactggagagtctaaggcagctctctggacccaagctgtaaaggagataatgtgtccagagttggttcctgctggtgggtttgtggtcttgctgacttcaagaatgaagctgcggacctttgcagtgagtgttacagctcttaaagatggcatggacccaaagagtgagcaacgtttattgtgaagagcgaaaggacaaagcttccacagcgtggaaggtgaccctagcgggttgccttgctggctgggggggggtggccagcttttattcccttatcgacccctcccatgttccgtttctgtcctatcagagtgcccttttttcaatcctccctgtgattggctacttttagaatcctgctgattggtgcgttttacagagtgctgattggtgcattttacaatccgcttgtaagacaggaaagttccccaagtccccactcaactcaggaagtccagctggcctcacctctcaattatccctctaaacaggtcacccaacagctgttgggaactgggtgatgaccgctctgggctacttcctgccggataggggtgaagaaggggccctgcagttgtagtgtcctccagaggggaactctctaggccagtgaaagggccagtgggtcagtccaggggtcctcagtagaagttctgagttgagctcatttggggttccatttgtaagaccctctgtagcttgatggcctcgatcctggaggaaacaaatttgacaaggttgttaaaaatacaggacccaaaggcaagtaatagcaagatggctgtcctgagactgagaaaggggagaagccatgttgcccaactccagaggttggtataagagtttgaaaggcgttgtctgatttcagaagccttttcctgtaaacgataagcggcatctcatactatcccttactggttagtgtaaaagcaacactcttcccttaagaatgtacagtcctcctttctcagcagtgaggaggtctaggcctcagcggttttggacagtcactgccactaaagagtctatttgggattgtagagtaacgatagattttatttcttgcaaactgtttgaaaaatcttttgagagtgtgtggtaataggataatgaagtagataaactggctattccagttcctgtagcagtggccattcctaaccctataagttggagtattagttgtatggccctgcactgacaaacttgagctttgaggggcactgatagggtctgatttcctggggcaatgtcaatgttgggacttaggaagactaaggtgcaggtgcgtctccagttggtggggaggcagatataggttgaagttccacatgggaagaatatgccttggctgggtagacagaaatggttgtgtatgttaaaaaggcgtgtgagtttgttcttttcattttcccatactcctggagtacttgtcaaggtagctccagtgagcagctggaaaggggtattgggagcaaactgagtggctccctgtgttctattttcccattagagaaaaaaccattttgtatctactaggaaccattcaagagagtgattgaaagaggggatgagaaggcattcattagtggtgggggcgctgctgcaggggttccaggggtgaatggtcatgcagggaggatgtttgccattacaaactgtttaagcagggaggaggtgatgattttagggggccctgagaagcagacaagccatctgaatggagctgtttgggtgactcggaagttactatgatcagttggggcttgaagttgtagggtataattacactgatgggatagcaggtgtcccaggggcaggcctgataacaggttccattggatgcataaaggggcttggaaagttaagatggtattcgcggttacagggccatgtatgggtttttcattgctcatgtaatagatgaagttggaaatgtaagagcgtaaaagctggattgtacgtcctgttagggtatttttggtcctatcggagatggggaagttggctaatgattgcatatttacaagttggaaagggtattttccttcataacgggtgtccaaagtttaactcgggtgtggtgaatccaagattccacttctgccaccttaactgtagtgggggtagagaggattacggagtatgttccttcccacaaggaatccatagatggggaggtagaggggagggacttgaccaacactagatctcctggttggaacaactctgttcccttgtcttcgtgacatccttcgggtaggtttttaagattttattgatattttgccaaagaagttatatctttgaccaaactggccatttcctgataaagtagaaggtcattagtgagaaaaggtcatccatacagcatttcatatggactgagccccattttgtgaggagaatttcggattctcaacaaggccatgggcaacagagtaggccatgggaaatgagtttcttgtgttagtttccttaggtgcctcttgagtgtttcatttgccctctagaccttccctgaggattgtggcctccaggtgcagtgaaggtgatattttatccctagtgccctggaaattccctgagttaccgtggctttaaaagccagactgttgtcgctttgtaagctttggggaagcccaaatctaggaattatttaatgaattaggtctttaaccacttcctgaaccttctctgtcttgcaggggaaggcttctatccaatttgtaaaagcatcaacacagaccaacaagtattgaaatccacttgacttaggcatatgggtgaagtctaattgccagtcctctccaggatagtgccctattctttgttccccaagaggggccttacaatgaaccaagggattattcctttggcacacctcacaggctctgactacttgttggatggttcagaggagatttgaccctgtaaatagggatttagctatttgatgagtgctctcaatacccatatgaaaagtttggtggagggtcttaagtattttccactggctggcttcgggtatgagtacctttccctcttctgtcattaaccacaccaaggggagaaaactatgcccccgtgaaagtcctcattctgtttctgtcggagaatactggggcttaatctcctggagagggttgttccataacaagggtccttattatgggtaataataacaatatggaaccttgttccataacaagggtatttctaatgggaggttctgcctggcagcaattttagcctcagcgtctgcctgacagtttccttctgccttttctccttcacctttttgatggcttcggcagtgtaagactgccacctccttgggtttttgcacggcgtgcgataactccatgattttcttgtggtatttaatgggggtacccccagaagttaggaactccctttcattccatattgcagcatggccatgtaagattagataagcatacttgctatctgtgtacatgtttattcttttttcctttcccagttctaaggctcaggtaagcgccactagttctgctaactgggcgctggtccctgggggaagaggcttactttcaagtactgttacatcactaactatggcataacctgcctttcatatcccattctccacaaatgaacttccatcggtatataggttaaggtcaggattagctaaggggacttctaagagatcctcttgggcagcataaggctgggctacaatttgttggcagtcatgcttgattggttccccatcctctgggagaaaagtaacagggttgagggcagcacatgtgtgtatttgaagcaccagcccctcaaggagtagtgcctggtatctaagcagatggttgtctgatagctataaatttcctttggcacccagtatgccatttacatcatgagtagtccagagggtgagatcctttccttgtattattttgatagcctctgatactaagatgaccaccgccataactacccataaacagtgaggccagccttttgctactacttaggtatttccttacttaggtatgccactggttgtggggttgttccacgagtctgagtaaggactccaagagctattcccaatgtataaagagaagttttgtgacgtataaagagaagttttgtcctgtgagaaggcttaagactggagcttgtactagggcctgctttaaggttttgaaggctgtttctgcctctggttcccattctactagataagtatttgccctctgggtgtccttgattagagtatagagtggcctggccaactcgctatatctggggatccatagttggcaaatgccgatgatcccaaggaacacccacaactgctttaatgtctttgggtgaggaaaagccaatataggctgtatttgttctttgctgagggccctggttcctctggctaagattaggcctagatatctgacatgctgtaggcagagctgggccttcaatttagatgccttgtacccttgattagctagaaagttcaagagatgtagagtagcctgctggcatgaggcttccgaactggtagccaaaagtaaatcatccacatactgagggaccagagtgcctggacttgagaagtggcctagatcttgggccaatgcctgaccaaagagatgaggactatccctaaactcttgaggcaagaccatccacatgggttgggaagtgtggtctgtgggatcctcaaaggcaaagagaaactgggagtcagagtgcaggagaatgcagaaggtggcatccttgaggtccagaacagtgaacaattctgcttcctctggtatttaagacagcatggtaaatgggttgggtacagctggatatagaggaattactgcctcattgatgagtctaagaccttgcactagtctccactgaccatttggtttttgtactcccagaattggggtgttgcagggactgctgcattttcttactaagccttgaacttttaaatgtctaacaatatcctgtaatcctttatgagcttcaggtcttaagggatattgcctttgataaggaaaggtagtggggtcttttagcctgatttgaactgggtgggcattttttgcccttccaaattgtccttccaatgcccagacttcagggttgttccctcttcaagtaggggacaacaaatgggtaacttgttccccatattcatgtaaataatagctccagctttggctaatatatctctccctaataagggtgtagaactttcaggcataacaagaaaggcatgtgaaaagagcagtctcccaattacaaatgaggaggtgggagaaatacctggttacaggctgtcccaagattcctcggatggtaacagaccttgaggacagccatccagggcaggagcttaacactgagaaagctgtgccagtgtccaggaagaagtcaatttcctggccctcaatggttaaacttacccgaggctcagtgagggtgatgacatgagctggcacttgccccgggcaccctcagtcctgttgttggatcatctggttgggggcttctggcctagagaagctttgtcctctggggcagtgtgcctgccagtgattgccttggcatagtggacatgggtgagggggcggcttgtttctcattggacaatcttttttaaagtgtccctgcagaaaaaaaaaccaaacaccgcgtgttctcactcataggtgggaattgaacaatgagaacacatggacacaggaaggggaacatcacacacgggggcctgttgtgtggtggggggagggggagggatagcattaggagatacacctaatgttaaatgatgagttaatgggtgcagcacaccaacattgcacatgtatacatatgtaacaaaccttcacgttgtgcacatgtaccctaaaacttaaagtataataaaaaaaaaagtgtccttgcaaaccacactgataacaagccctactgggtgattggcctgctccattttctgtcctctctgaaccaccaaggtttgtttgtctgagggccatgactaagtctgcggcctttctcttatctcgcttttcctttttggcctgttcctcttggtccctattatagaacaccaaggttgccaggtttaataatgcctccaaattttgttcagggccagggctagcttttggagctttctcctgatatctgcggctgatttggtaataaacttatctttgaggatcaattgaccctcgagagagtcaggtgacaggagagtatattttcttaaggtctcccatagtcactcaaggaaggtggtaggattttcttcctttccctgagttatggtggacttcattgaatgattcatgggcttttttctaattctccatagtccttctagaacacaggtcaacagatgtttgcaactccagtccccatgatctgagtcgaggtcccagtggggatccatactggggatggcttgctgacccatagggaatttgtccctttcttcagctgtcattctatcatttacttgactaagataccaggtatctccaaactctcaggctgcagctaaagccgcattcttttcattaaaggccagtgtttgatctaacaatagcatgacatctctccaagtgaggttgaaggtttgccctagaccctgtaggacatctatatacctataaggatcatctgaaaacttccccaggtctaccttgatctgctttaaatcagagagggagaaggggacatgtacccgggttgggccaaattcccctctccctacagcttgaaggggacaaaaccgatagccggcggggggggggtgggggctgtggtaccttggagatttctttgcttgtttctttctgggtgggggagattagaggaggcttatcagtttccattggctagaacaggaccttccattctgtatttgtcctgattggctagcaacttaggactttttaaaagaggcaaaggcagaggagaacaaaggatggaggaagtaacttgtgggatgctgagaaaggtaaaaacaccttcagataaggaagaggaacagactatgacctaatgcttgcttggaccagtataagcatgccagggcaaatatttaggctaaattgtgggagctaagaacataaagtacactgatttctttattacagctagcagatatttaagaatgttagtgagaggtgacagtgtgctggcagtcctcacagccctcgctcgctctcggcgcctcctctgcctgggctcccactttggcggcacttaaggagccctttagcccaccgctgcactgtgggagcccctttctgggctggccaaggctggatccggctcccccagcttcacggaggtgtggagggagaggcactagcgggaaccaggctgcgcacggtgcttgcgggccagctggagttccgggtgggcgtgggcttggcaggcctgcactcggagcagccagccgtccctgccccgggcaatgagggtcttagcacccgggccaatggctgcggagggtgtgctgggtgccccagcagggccagcccactggcgctgagctcgatttcttgcgaggccttagctgccttcccgtggggcagggctcgggacccgcagcctgccatgcctgagccttccccgccaccacgccctcctcccccccgccctcctctcccccccgccctcctcccccctgccaccctcctcccccactcctcctcccctcctccccccgccctcctcccccccaccctcctccccacccccctccccacccccaccctcctctccccctgccctaccccccgctccttccccctcctaccccctcctcccccgcctcctcctccgtgggctcctgtgcagccggagcctccccgacaagtgccgccccctgctccacggcacccaatcccgtcgaccacccaagggctgaggagtgcgggcgcatggcgcgggactggcaggcagctccacctgcagccccagtgcaagatccactgggtgaagccagctgggctcctgagtctagtgggaacttggagaacctttatgtctagctaaagtattgtaaatacaccaattggcactctgtatctagctcaaggtttgtaaacacaccaatcagcaccctgtgtctagctcagggtttgtgaatgcaccaatcaacactctgtatctagctactctggtggggacttggagaacctttgtgtcgacactctgtagctagctaatctagtggggatgtggagaacctttgtgtctagctcagggattgtaaaggcaccaatcagcgccctgtcaaaacagaccacttgactctaccagtcagcaggatgtgggtggggccacataagagaataaaagcaggctgccccagccagcagtggtaacccgctttgatccccttccacgccgtggaagctttgttgtttcactctttgcaataactcttgctactgctcactctttgggtccacactgcttttatgagctgtaacactcaccgcgaaggtctgcagcttcactcctgaagccagcgagaccacgagcccaccgggagaaatgaacaactccagacgcgccgctttaagagctctaacactcaccgcgaaggtctgcagcttcactcctgagccagcaagaccacgaacccaccagaaggaagaaactccgagcacatccgaacatcagaaggaacaaactccagacgtgccaccttaagatctgtaacactcaccacgagggtccccggcttcattcttggagtcggtgagaccaagaacccaccaattccggacacattagtacaggtctttgaataaattttgcttctaacagaagttactatttattcctaattagatgggcaggaaagtctttgaagaggaacctctactttactttttactgtagagagagtagtctttgatcttggggagatggggtttttccttttggtttagcttcaggaagtttgtgttaattggccttaggtgccctgcccccagccccaggtgtttttcctttgatttaactttaggaaattatcacgaattggccttagattccccgaccccagatcttggtgttttcacttttaggaagtccgcatgaatcttatctatgctcttaactacgtcctaatttttgtgttttttgtcttttttataggaatagggttttgccatattgcccaggctggtctcgaactcctgagctcaagtggtctgcctgcctcagcctcccaaagtgctgggatcactggcgtgagccatcaggcccagcctctatgtgctaatttttgaacaaattccaataggagcattctagtctctgagtgtgagatgaccaaaaatcaagcccttgtgaggctgaatagagtcgggaggcagggaacttaaggctgtttcaggccgacttcctagaactaaattgaaaggaaaaccctcactttcctcgcctaaataacaaaaggaccagaggctactccctttgaccttttctgctggcagataggaaattggctgtctgcaacaaatcagactgatggccggttgagtcttcatttgcatagaagtgtaactttgtaacgtcgtaacttcaccctagcctttgattggttgctttttgcaaccaatcagatgtttgcacaggagtgtgacctttgtaacttcagactctggttggctgctttctgcaaccaatcagactgaacgcgggctaccgcttcatttacaggaggtgagcatgaagtggccaatgggaaaattctaggaggtattgggactcatgaaggttctgtttcggagcccttgagctgccgcttggccagttcccacactgtggagtatgctttcgttttcaacaaatcccagctcttgttcttttgttgcttcattctttctttgctttgctgggcgttttgtctaattctttgttcaaaacgccagtaacctggacagcttgcagtcaagaccccctaccggtgacacttgcgctcttcggggaggtaaacagcatttcctctcagctctgggttggaaaaagccgcagcagctgatgggcccgggaacccgaggccccgccccctaggtggtcctagcctttgcgcgtgcgcggcgtgtctgcgtgggcgcatgcgcataacggccgccatcttaacagcgcgttcccgttggcgtctgaggtaagtttttgtttctgggcggcgttcggtggtgtcccggtgcagccacgcgagagtagaagggtggaaaggggaggtgcccagtgaaatggagcctgtcccgtgcactttcgggcatttcgagcatcttgtgggctctcccaagtcgcggcccctcctctgagagccacagtcaggtctgtcctcaggggtcgaggcggctgcgctggggcctcggcccgggaggaggcggggggcacggcctttccattttccctgctcccctctgcagaagcctcatagggcccggcgcggcggctcacgcctgtcattcccagcgctttgggcggattgggtaggaggattacttgaggccaggagttcaagaccaggcagggcaacatagggagacccccccccccaaccatctctaatggaaaaaaaaaaaaaagtctccacatccagcgttgtgccttttctctataaggaacagcatctctgccttcctgttcacggtgaccttcgcttggtgtcctcctggcctcagcaacctgacaattctgtcgtgtcccggtgagcacttcatgcacttgttctggctgtgggtgtcgggtcttgaagtttaagttgtgtcgaggtggaaagaaaccttttcaggtggttgttcgagagcacatggatctgataccatcgaatgcatgagtggatgaatgcacataactgtaaaatttaccaccaaggaaaaacacaggactactcaactgtggttccaggccatcacctagatctcactctagcgccctgtagattcccccagaggttcaaaacgagggcatccccaggaacacggtgcgggctgatttactagcaggagggattgaattgataatgaatgcgaagataacttttgacaggtgggttttctaccagttactcatttgaaagtcttactgagggcggggcaaggtggctcacacctgtaatcccagcgttttgggaggctgaggctggaggatcgcttgagcccaggaatttgatgccaacctggaaaaaatagggcaagcctctgtctctactaaaaataaaaaattagctgggcatggtggtgtctgtggtcccatccactttggaggccgagatgcgaggatcacttgagcatgggaggtcgaggctgctgtgagccattattgtgtcactgcattccagcttaggcaacagagtgagaccctgtttcaaaaagaagaaaaaaaaacaaatactgatctagagaacatctgtagctcgagtaaaacaaatgtctttagtccaggtgtggtggctcacgcctgtaatcccagcatgttgggaggctgaggctggcggatcacgaggtcaggagtttgagaccagcctggccaacatagtgaaaccccgtctttactcaaaatacaaaaaattagccgggcgtgggcacctgtaatcccagctactcaggagcctgaggcaggagaatcgcttgaacctgggaggcagaggttgcagtgagccaagattgcacccttgcattccagcctgggcaacagtgcgagactccgtctccaaaaaaaaaaaaaaaagtctttaacccttaactacattcactagttgttaagatttgtttcatttttttgtatatgtactttatcatgagccatttaaattggaagtgaatgaactttccccttttaagcgtgtatctcaaatacctcctgaaagtgaagacaagcttaaaacaagacttcattgtccatccccacccccaaatcaaatcagatttccccagctgtccaaaagtcaccatagtcaccattatagttgccaggttgtttgcatgtttttagatctgttaaatctgttttttaactagactattcacctgattttttttttttttttttttttttttgagacggagtctgtctgtcccaggctggagtgcagtggtgtgatctcagctcactgcaacctctgcctcctgcgttcaagcgattctcctgactcagcctcccaagtagctggaattacaggcgtgtgccaccacgcccggctaattgtatttttagtagagacagggtttcaccgtgttggccaggctggtctcgaactcctgacctcgtgatctgccggccttggcctcccaaagtactgcgtgaaccaccatgccccgccattcacctgaatttttaaaaataaaattttggcctttgaagatttcaggagcattatcttgtaaaatgctgccgttctcatgcaatgatgttttcctgtgattttatttgatttacctatgtcctgtatttcttgtaaagtggatgttggggttacagtggtactgtctaatacaaatataatgcaaggcacagatgtaatttttaaaaattttagtagccaaattagaaaatgttaaatgtatgtgtgatatcatttttaatatattaaaaatgcagcatatccagttatcaatataagtttttgaaattagtgactaatgtagtcagtttaaaactgagacatttcacacttcttttgtactaagtctttggaatcctgcacgtattttacacttacagctaattttcattggaaattcttgatctgtatttagagtttataaaattaactattgaaaaagtagattaacaaacccaggttgttccaaacatacttaaaagtttttcaataacaattttatttttaaagttgaattaaaagtaaataaaattaagaattcatttcctcagttgcactagccacatggggctagtggctgttgagttagactggccagatccaaggcttccattttctaggtaatgtactgggcttcatattatatcctatcagtagtcacatactacaagtttgttagtgatactacgcatttggtcaaggtactcatctctgtatagtcatgtttttcttatagtaatctataagtgatactttggctacaggggaatattctgttccccaacagcctttcacccagtggtttttttggttttgttttgttttgtttttttttgtttttgtttttgttttgacggagtctcactctgccgcccaggctggagtacagtggcgtgatcttggctcactgcaacctccgcctccccggttcaagtgattctcctgtctcagccttctgggtagctgggattagagatgtgggtcaccacgcctggctaatttttgtaattttagtagagaaggggtttcacccatgttggtcaggctggtctcgaactcttgacctcaggtgatcctcccgcctcggcctcccaaagtgctggaattacaggcatgagctaccgcgcctggcctcacccagtggcttttaacatcactcagtcatcttctcctgaacctgtttttacattgagaggttaacagttttttttcctagttctgttgttctttctccattctttagctgacagtcttaggtgaagaggagctttctttcaccactttcactgccctctatactttttttcttttttggaatgtcacaacttattctaatttttttttcttttcattcactgtattataatcaattcctgtcattcgtattgatgctcaaactgtcccaattttgaccaatggtaatttttaaatttggctctgtgtcttgtgacacaactctactaatctgagtgcaaaatcagaccccagttcactttgtattttcctcttacagacctggaatcaatgattgctccaaaaagtcatgttccttttagacactaaggtctgtgtgataggcccacagtggacatctatggccttacagtggacatctagaatatgtattttcttacatcatacatttatactcatattcctattacaaacttaagaggttttttgtttttccttatgtttgtatctcttatctcttataataaagaccttgactcctaatgacactgatatattatttgttgtagcaacattaccagatgactagtattactaccattactttatttagtattgagtttctttatatttctttttgtccttactaaggatataaagttcaaacatttgcttgaactcagtttttttctctgtgtggttatgttatgaatttgacatactattaggcttgtttgtcttttttttttttttttttttttttgagacggagtttttgctcttgtccaggctgtagtgcagtggcgcaatctcggctcactgcaacctccacctcccgggttcaagtgattctcctgcttcagcctcctgagtagctgggattacaggctcctgccaccacacctcactaatttctgtattttagtagagacgagctttcatcatgttggctaggctggtctcaactcctgacctcaggtggtctcaactcctgacctcaggtgatccacctgcctcagcctcctaaagtgctgggattacaggcatgagccactgcgcctggcctaaatgcatcagcattttgatagtctcagcgcaaagtagggctgtataaaggggtcatcatccgtatctgggtgcaaacaacacggtgtcgcatttccttggaaaacagtaaatttgagtagatgtggaatgttgtgtcagaagtcttttctttgaaactcagcacctgggttgtaaatggatacttcttcttggtgtcaaaatattacataagccctccaggtgaaagtgggatatttcagtctttctgatatttcttactgatagaatttcaaacagcaaatttctaataactgattttagagaacaaagtttcacagtgtgtaaaaaagcaacaactcaaaaaagtcattagaactgctttgttctttttgtggtgactgtgcagctgtgtttttttgttttttgggctgggggtttgaagttttaaacttttctttattattcttgtgcttacccaatacagctgtttaaaaatcatagtttattattcctgtttcataaatggaatgaccttgagcatatgtggtgccatagtttttaatttcttttatatttatatacaatatgattgatttttgtagttagtctttgtttttcaaggtcactattttcttattactattttgtctgggtgatccagtcattgttgaaagtggagtgttgaagtcccctactgttatcatattgctttttcttctttcagatccattaatatttgctttatgtatgatgagctccctaaatatattggtgtatatgtacttaaaacttctatatccttttgataaattggtccatttattatataatgatctttgtctcttgtcacaatttttgtcttaaagtctattttgtgtgatgtaagaataggggctcctgctgtcctttggttatcatttgcatggaatatctttttctaacccttgacatttagtctgtgccccttaaaattaaaacgagtctcttgtagccaggagatagttggatcttgtttagtttgttttgagacagagtctcactctgttgcccaggctagaatgcagtggcgtgatcttggcctactgcaacctccacctcccgggttcaagcaattcttctgtctcagcctcctgagtagctggaactacaggcatgtgccaccatgcctggctaatttttgtatttttagtagaaacggggtttcaccatattggcaaggctggtctcgaactcctaaccttggcatctccctgtttcggcctcccaaagtgctgggattacaggtgtgagccaccgtgccccacctgtttgttttaaccatattcagccattctgtgtcttttcattggggaatttaatccatttaaagtaattgttgatagatgatgacttgttattaccatttacttcattgttttctggctgttttgtagtttttattcctgtcttctcttgcagtcttcctttgtgattgatgactttttgaatattccattctcctggtttgcaaggtttctgctgagaaatcaaagggtagtattatggagattcctttgtatgtagtaagtcatttttctcttgctgctttcaaaattctctgtctttgacttttgacaagttcactataatgtgtattagtttagatctctttcagttgaaccttgttgggggctttgagattcatgaatatgggtgcctctgtctccctagatgtggaaaatttatagctattctttatataggctttctactcatttctctctctgctccctctgtaacttctttaatgtttctgttcacttggcagagttccacaggttctttaggctttcttcactctttttcattgttttttctttttgttcctctgactgactataatctattttttattttgttgattcttctgtttgatgatgtctgctcttggacccctctagttaatattttagttcaattattgtactcttcaactccagtatttctcttttgttctttatcatttcaatctctgggttgaatttctcacttcattcatgtattattttcctgacctatagttatgtatctctgctgtcatttaactcactgatctttaagatgattgttatgacttccttctcaggttattcacaggtctccatttcttttgggttggctactgaatatttgttttctttgtgtcatagtttcttcttgattcttcatgctatttgtaggtttgctttgctgtctgtgcactgaagtagtaggtatttctctcagtctttatggcttagtcttgactgggaaagacgttcatccattagcagtgctccatatgagacaagatcaggactgacccctacagaagtataccataaggttgatgacaagcacaccttctcttctctctctctccacagaaaagcctctgtttgtgatttttctcagtcatacagagcagatgtaagaggatgtctgcctcatttctttctcagatgatcagcaccttagtatgaggcaagatggctactggccccttggagaaccctctgagaggtcaggaggtcaagtagccaatctcacttcttcccatgaagaaataatgtgccaccatgtccagctaattctttagttttctgtagagatggggtcttgctatgttgctcaggtgggatgcaagtgattctcttgccttggcctccccaagtgctgggattacaggtgtgagccactacgcctagcttcctttggaattatttttaacttcattttaattttaaggggcacagactaaattgtcaagggttagaaaaagatactccatgcaaatgataaccaaaggacagcaggagcccctattcttacatcacacaaaatagactttaagacaaaaattgtgacaagagacaaagggcattatataataataaagagaccaatttatcaaaaagatataaagtcagcacaactgagctgagctggttttgcagaagggctgatgagggtaagttgaaaattgttcttactggtataaatgcaactgttctcagtttgtgctcctctagggttgcttgcaattattagcttgattatggatttctcttcaaggtattttggttccagtattgttactatgtgtttccatgagtgaacagagaggtagggcttcctactctgccattttactgacattttttatgatatattacttattgaatcttaaaatacaaataaagtagttctgaattgctaattcagacccctgtggaaaacagatttattaactgagttatttttgtgtcattcttttatatttaggcttagattatatgttcaaaatactgttttccaaaatcacttagatgagttatttttatctttcaatatggttttgttattcatttgtaatacagttaaaaagcagtcgtttttgttaccttaaagtataatgttagctttggcgtttttgtagatgccctttattaggctgaaaatttttcttgggcttattgaacttcattaaaaacaatcatggttaatgaattttgtcaaattccttttctgcatctcatgagatcatctgattttctggcctgctaatatgttgcattaaattaatttacatttgaatatcaatctggcatttctgggatatgttctaacttgatgtattatcttttcatatatagaggtatacatatgtatgtgtgtgtgtatatatatatatatcactgtattcattttgctaaaattttattgagggtttgtgttaactctctgctctgcaaccagcctgtgatagctgagggcccagagtaccttaaatggatttatcttcacccctttgccctgccacttgccttggggggatggttgcctcggtcatcagggaggctacatgcacctcagtgatcctgccttatcccagcctttgatatactatggtctaatattaggtgaaggcttggtgaaagtctgtggatggattcatcactgtgaattctgtaactgagatgtctcagaattctaatgtggtcaatcagtccacactctgctgtcaaattttggtaagatttaattatgatttctttataccttcatgtgtggcagattctttctctcatcactcatccaagattgagaaaaatcatgggtatcttctttcttagcaaagcttattatttaggtgtatctgcattcttggctctctgaggtatttttaaaaggtatgattttgtagttatgtggcttgtgttttaagagagaaggatcaacccttggaagttctacattctaatatgaatgtatgagaaaatgtatcttggtttttgttttgttggatttttgagacaaggtcttactctgttgcccaggcaggagtacagtggtgagatcacggttcactgcagcattgacctccctaggctcaggtgttgctcccacctcagtcttctgaatagcttggagtataggtgagtgctaccatacctggtgaagatttgtattttttggtagagacagggtttcaccgtgtgttgcctaggctgggctcaagcaatctacctacctcagcatgccaaagtgctaggattacaggcatgagccgccatgcccagccagaaaattttaaaaatagatatttgtagagttatgcatccaggaggatttttagaaatgggacttctaagtcaaagggtaaatacatatataatttaactatatcctgccaaattccctagtgttttttcttttaatgaagttaaaaataattccaaaggaagctaggcgtagtggctcacacctgtaatcccagcacttggggaggccaaggcaggagaatcacttgcgtcccacctgagcaacatagcaagaccccatctctacagaaaactaaagaattagctggacatggtggcacatgcttcttctcctagctacttgggatgctgaggcaggaggattgcttgagcccaggaggtcagggctgcagtgagccaagattgtgcctactgcacctcatcctgggcaacagaacagggccctgtcccccacccccacccagaaacaagcctgagaataagaggagataattcctacgtatgtaactgacaaaaaaaaaaaggctaatatccaaaatacattaagaactcttacacgttaattccaaaaattcaaacaatccaatagaaaaattaagaggcttgagcaggctcttcgcaaaactgactgtactatggataataaacatgaaaaattgaagtttttatcctcatcaataatcaggcaaatggaaattaaatctgccactacacatatatcagaatggctaaatccaaaaagagttacgagatgttgaagagaatttagagaaactagagtttgtgtatacttttagtgtgtaaagtagaaatatgttttgaaaaacagtttggcattgtgttccaaatttgaatgtaaggatatacccttaaatgcgaccatataacatcattatttgaaatagcccagaattaagcaactcaaatgtctgtctacaagaatacatgaataaaccatgctatactggttaagtgtcagaaatacttgggaccagaagtcatttggatttcagatttcttcagattttggaatatttgcattatacttcagaaatttaaaatgtttcagtgagcatttcctttgagtgtcatatctgtgctcaaaaaggttttttggagcattttggatttcagattttcagattagagatattcaacctgtattatggagtgcttttcggtaaaaggaaaagaactatatgtgtaacagtatggatgactcataaacataatgttgaatcaaaaaagctagacataaatgaatagatgatttcatttataaagtttaaaaacagacaaaattaacctataccgttagaagtgagaatagtttccatttgcgaagaggggcaatgatttagatgtgtcatgtgtgcatcaaggtgtagaaattaatgatgcattatacctttgtaattctactcttttgtgaatatatatttcaattaaatgtttaaaaaattcagatgtcatttccaggtgtttgaaagagattagcaaaatgagtataaagaaaacataacactaaaagcaacatttaatgggaaaaaaagtaaaactgatgagtaaacccaagagataggttttttagaagtataaaattggctggtcatggccaggcggggtggctcatgcctgtaatcctagcactttgggaggctgaggccggcggatcacgaggtcaggaggtcgaaaccatcctggctagcatggtgaaaccccttctctactaaaaatacaaaacaaattagccaggcatggtggtgggcgcctgtagtcccagctactcgggaggctgaggcaagagaatggcgtgaacgcgggaggcggagcttgcagtgagccgagatcatgccactgcactccagcctgggtgacagagcgagactctgtctcaaaaaaaaaaaaaaaaaattagctggtcatggtggctcacaccggtaatccagcacgttgggaggtcaaggcgggaggatcgcttgagcccaggagttcaagatcagcctttccaacattgcgaggaaccccttctccattccagccccaccaccaatctctgccaaaaaaatttttaattggccgggtgtggtggtggcttttgcctgaagtcctagctactcagaaagctggggtaggaagattgcttgagcccaggagttcaaggctgctgtgagcttgatcctactattgcactccagccttgggaagagtgcagccctgtctcccccatacccccagaaaaatataaaatagacaaacttttgcacaatgtgtgattcagcatttcatccaccccatacattttcttttttcttctttttttgttgagacaaggtctggctctatcgcccagactggcatgcagtggcgtgatctcagctcactgcaacctttgcctcccaggctcaagccaccttcccacgtagctggcactacagacacgtaccaccacacctggctaatttttgtggtttttgtagagacggggttttaccatgttgcccaggctggtctcaaacttgtgagctcaagtgatctgcctgctttggcctcccagagtgctgggattacaggcatgagtcacaccccaaatattttctaccctctgctaggacctatgaatattaaaagaaaaacttcagataaacgtaatagttaagcattaaaggattcgtgaatcaggcagcactccaaaaccagaagggttcagggggctctgctgtagcagcatgcacagttggcttttgtagactgaatgtgaaagcaaagtaaagaaattacttaattggcttagccttagcagtattctgagtttctttagtgaaccattattattactctattgctttggataaaaagttgagtgtcaacttttttagggaagccagatgtcagttttcaagtgtcttatggttattttcttatattttcttgccagaaccagttctgagtctgtaaatatacatttatatgtgtgtgtgtggtaggggaggtggaggatgatattacttatccattcatctatttttttccatagtacttgtcaccaattgacataatacatatttatggctggacacagtggctcatgcttataatcctagcactttgggaggctgaggcaggcggatcacctgaggttgggagttcgagaccagcctgaccaacatagggaaaccctgtctctaccaaaaatacaaaattagctggggttggtggtgcatgcctgtaatcccagctactcgggaggctgaggcaggagaatggagtgaacctgggaggcagaccttgcttgcagtgagccaagatcgcgccactgcactccagcctgggcgacagagcgagactccatctcaaaaaaaaaacaaaaaaaaacttatgtgtttattatctgcttagccctttagaatgtgagatacttaaggtctaggacattttttgtatagttgactgctctatcctaagtgtctagtacattacctcacaaagataaggtccttcataaatgtttgcagagtgaatgaaagcgtaagccagagatgaggacttgaagggaagccacctggcctacatgatttttacagctggaggagctaaagatgtctaaattcaataagccatttgtgttgggggtcctcaagaccaccaccctcacgctcagtgatggaagcactcacaggactcagaagctattaaacctacagttatggtttattataataaaagggtacagattagaatctgcaaagggaaaagatgaatgaagtctagaagaaaccaggcttctctcccatgtagtcacatggacagtgcttaattctcctagtaaaagtgtgtagtattcctgcaaactgttgccaactagggaagctcacctgagctttggtgtccaggatttttactgagggttagtcccgtaggcatacagcacctgaatgacttcatacacttatgcccagcccctcaacagttcaaactcatgcattattgccagaagcctcaggcatacaaaaacaggccttcagcataaatcatattgttagcatacacaatctggtcacactagtatagtttggctcaatagctcaaccatagaaaaatatacacttaccagggaagatattccataagctaaaaggtcatctctcacaaactgagccaagtgtcagtcctgaagacagatctttctcaagagagtgcagggtttgggcaacccaggcctgttgagttaacctttccgtacatcatttcatgacgatctcatggtcacgttggagaataagaagaacctcaggagtttaggtttgtgagtcagagtaacctgtattcatatcctggctcacactttctaattggtgatgttgggttaattagtgtctgagcttaggtttcctcaactaatatgatagtaacaaaaactgctttgataattatatgaacttatcctaccactgtttctggcacatgggtactaggtaaacgggatttgttattatttatgtccacgtggcataatactctagtggcactcacatgaacaacttcatcttctgcagagagatggctaatgaatggcgcttgatgacagatgagtaatgcctgttgctgaaagattgacggtatgaggcaagactcccactactacttaatcaagaggaattgagattgacttacccataagttcagacagtgtctcgaagagactttgggaacaagatattcaggcacatttcactgttagactcacaggatgctggccattggtctttccctttgtggtaagtccgtattgatggtccttcaagacgctgctttaaccagtctgtgaacagcttgtcttgtgattagggtttagggtctaagtggccctgcttttgagatacctagaagaggctaaagtagatacgaatattctgtggtctaaatcctgggatttgggaaggaggagtaagtatgcaggcttttgtggaagaagttctgcttaatcacatgatcagtttcttttttggcaaataaggaaaatgttaacttctctggactttgtattccttataaaatgggattgttaaactctctctctcctggtcatcaaagcctgaagcatattttctggcttcaggtgagacaggctgctcaggcattttattataacgtgtgtgtgtccacttagcattagtatgaggtggcttcttgccttgtgagtatggaagctatcagcagcctggattctcagattttatttcttcttcttaagatcatctttctcaagatgttttctgtcttcatgagtcaaaatttgaagaggaaaggatggtggctgggtggttgacaaattactctcaggtaagtaggaaattgctttttctgtagaagcatatgcttcttcctaccatgtagatgtgttttctcctagtggaacagggcccctgcaagcaaagagggtctgcttagggaccacatctctcatcaaacttcttcggaccacagggcctctcacatggttgacaggtttcacagggaaatgattgtactatcccactgtttactaattcagtctgactgtcatccatgctgatatgctttcattttgctgtgatagggagagaatgcacatgtgcttctcggaatttgtgctgtcactggagcatttatttgagtgtctataatgtattcagggttgtgctaaaacctgtcagtagagaacaataagaagaagtcacaatctagttgtgctgagatatattcagttaggtgaaagaggtgctcttcaagccatatgactagatgagatcaccggtgaatatgtacagacaggggagaagaaagtgaggaccatcaagtgataggagaccaaagagtcttgtcaaggcatgccaagacaaggtccctcattctccagtcaacatagtggagaacgtacttgcctgacgccagcatgtgtgtgatggtttaggactcagtgacctttgaggatgtggctgtggacttcacccaggaggagtggactttgctggatcaaactcagagaaacttatacagagatgtgatgctggagaactataagaatctagttgcagtaggtaaggctggtaccattcttttcatttagtttttttctggaacaaatgtgtcttaagtaactatgttctagactctgcttgttaatgggctgcattggtaaacaggcgaaacattgtttccatctcatagaccttactgccttgtgatttttctgatgaaattgaagatctgttcattgttctagctttattttctccatggataaaagacttagagcttcttgaatatgtgtatgagcttaagcctgggtttcatgggaaggattgctagtccttttggtgaacagtgaatgagaaaagagtatttgaagtttaggttcacttgaaagtttttgtcatgaacattgtgttgtaatttaagttatatctgagagggttcagaatgcccagacagcaaaatcttagctcttaacatggaagcatttgttatcccttgcacattctttactttttttttttttttttttgagacagagtcttgctctgtcacccaggctggagtgcagtggcgtgatcttggctcactgcaagctccgcctcccgggttcacaccagtctcctgcctcagcctcccgagtagctgggactacaggcgcccaccaccacgcctggctatttttttttttttttttttttttttgtatttttagtaggaacagggtttcactgtgttagccaggatggtctcgatctcttgaccttgtgatccgcccacctcggcctcccaaagtgctcggattacggcatgagccactgtgcccagccatcccttgcacattctaacatcattcatctttccctgagaccagggtactagctatgcaaacatagtttgacttttcaggtgaaacaagaagagttaaagacagcgcagaaaattctccaagatgagagaaaagacagatgtgattatttgtgagaaacagccctgatctatgagaggtgcagtctgtttataaatattaagtaggaaggttttgaaagtgtacttttttggggagaatatcaaggccaattggtttccaaggttccttgggtaccttaacttctctttcactttatccatcttggaaactttcttttgctctgacattaagatctgtctcacttctcctttaaatttatgatttgcatttagctctgtatccatttcctttcaactttgtttccctggctgtacctcttttttgttcactataaagtctcaatgtttagagaaccatttcttttttttctctctctgtctctaaaaaaaaaaaaaaaaaaaaaaaagagtcttgctctatcgccaggctgaaatgcagtggcgcgatctcagctcactgcaacctctgccttccgggttcaagtgattcccctgcctcagcctcctgagtagctgggactacaggtgcatgccaccttgcctggctaattttttttttttttttgtattttagtaaagatggggtttcaccatattggccaggactcaatctcctgaccttgtgatccacctgtcttggcctcccaaagtgctgggattacaggtgtgagccaccacacccagcctagagaaccgtttcttagtgaatcacctaccaacttgacctcagtaccttactgttgctagactcttactacatccaaatttctcaatttatgtttcccgttctttaaaaaaacaaactatatttcaagccagtgtttgaaactacagtacatactagtcttgcatttttaacaccctttttaaaatcattatttctctaagaacttaaaatttttttcatcttatttcagattgggagagtcatattaataccaaatggtcagcacctcagcagaattttttgcaggggaaaacatccagtgtggtggaaatggtaagattcagaaggtataatttattgtcttccatgttagaggaagattggaaattccttaaaatggaaaagcagcacaataaccttgagacatttgagactagtgtttttcacccaaaaataatctgtctcttggagagactatggatcatgagtttgacaaacactctaaacatccctcagaatatatttgtttacatatttccttcaacattcccatatgtatctcagatgtttttgataaataattcactcttgggccgttatcagctaagctctatttagaagccctctgaaagtaaagaatataacagaacttcctgcagtcactttgttccacttgaaaacactcaggtctgaaccatgccttgcaatgaaaatggcaggaacaaacagtttcaattatactaacttattttccatgtgtaacagaattcagagtaaaagggagaatctcaatgaaataaatttggaaaacttctatgaaccatcattaattttcaccaacaggagagaaaccattttggagaggaactgtttgactttaaccaatgtgaaaaagccttgagtgaacactcatgccttaagactcacaggagaacttactttagaaagaaaacctgtgagtgtaatcaatgtgaaaaagccttcagaaaaccctctatctttactttacacaagaaaactgatatcggagaggaacttcctaactgtaatcaatgtgaaacagccttcagccaacatctacatcttgtttgcaagaaaactagccaaaatctacatcttgtttgcaagaaaactcacactcaagagaaaccatataaatgcagtgactgtgaaaaaggcttaccttcctcctcacacctcagagaatgtgtaagaatttatggtggagagagaccatatactcataaggagtatgtcgaaaccttttctcattctacagccctttttgtacacatgcaaactcaagatggagaaaaattctatgaatgtaaagcatgtgggaaacccttcactgagtcgtcatatcttactcaacatttaagaactcatagtagagtgttacctatagaacataagaaatttggcaaagcctttgctttttccccagatcttgctaaacatataagacttagaactagaggaaaacactatgtttgtaatgaatgtggcaaagaatttacttgtttctcaaaactcaacattcacataagggttcacactggagaaaaaccgtatgagtgcaacaaatgtgggaaagccttcactgattcatcaggtcttataaaacacaggcgaactcacactggagaaaagccttatgaatgtaaggaatgtgggaaagcttttgctaactcttcacatcttactgtacatatgagaactcacactggtgagaagccttatcaatgtaaggaatgtggaaaagcctttattaattcctcttcctttaaaagtcacatgcagactcatcctggtgtaaaaccctatgactgtcaacagtgtgggaaagccttcattcgatcctcatttcttattcgacatttgagaagtcacagtgcagaaaggccttttgaatgtgaggaatgtgggaaagcctttagatactcctcgcaccttagtcaacataaaagaatacatacaggggagaggccatataaatgtcaaaagtgtgggcaagccttcagtatctcatcaggccttacagtacacatgagaactcacactggtgaacggccctttgaatgtcaggaatgtgggaaagcctttactcggtccacatatcttattcgacatctaagaagtcatagtgtggagaaaccatataaggaatgtgggcaaacctttagtaattcctcatgccttactgaatgtgtgtgaattggggctgatacttggaaagaatgtggtaaagccactacttcctcacacttactgaacatgtactcattcatagtggcaatgtacacagtcataaggaatgtgggaagccttccttggtgtctcagatcttaacaattccaatagaagagaagacatatgaatgtaaggaatgtgggaaaatcttggctccttccataggccttactattcatgtgtctgtgcatcctaggaaacaaactgaacgtaggaaacctgtcgatgcttacatcttactgagtctgtttgaactcatgctggagagaaatgctatgaatgtgaggaaggtggaaaagctttcattattttcctcgggccttactgagcttgtgagcacattggatataaatgcacgtcctctggctgtaaggaatgtgttgaaacctttcactctgccttataccttaatattcagctgtgatctcacaagtgtgaaaaatcttatgaatgtaaaatgtgtggagattcttctttgtttttagcttccactttgggaacatgtcaaagcacacattgagaagtcccatgagtgaaagagatgttggaaagcccttgaacttggtcgttaggaaacatccacactgaagaggaacctgactgtatggaaggtcaaaaaggctgtattaatttacatgcaaaaagtcacactagaggaatgccatatcagaatgcttttggtaaatatacatgttttaaagaggttatatatcattaataaaaatatctagctggtctgaagatcctgagttatctcaattgttcacggttacagatggaactctttattattgaggagttccactctttcccccatttgtcactactacacttccctagtctttaaaacaattttaggctgggtgcagtggctcattcctgtaatcccagcactttgaaaggccgaagcgagtggatcatttgaggtcaggagttcgagaccagcctggccaacgtggtgaaaccccatctctactaaaaatacaaaaattagccaggcatggtggtacgtgcctgtaatcccagctactcgagaggttgaggcagaattgcttgaacccgggaggcggaagctgcagtgagctcagatcacgccactgcactccagcctggatgatatggtaagaccatctcaaaaaaagaaaaaaaaattaaaatatcctcagagggttttttaatgaaaaacttagttatagggaattgaggaacatttaggggtacaaattttcacttattgcacacaagaaaattggtactggccaggcatgctggctcacaccttaattccagcaatttgggaggccaaggcagaaggatcacttgagcccaggagttcaagaccagcctgggcaatatagtgaaacctcatcttgacaaagaataaataagattaactgggtgtactggtttgtgcctatagtcccagctatttaggaggctggggcaagaggattgcttgagcctggtcagggaggcagaggttgcagtgagccctgatcgtgccactacactctagcctgggcaacaggatgagaccctgtctcaaaaaaaaaagaaaattgacgccagcaaagaaaaccaaataaattatttaagtttgcctttctatatgtctttaaagactaatgatattgaacatcactttcatatgcttatgagtctttggtgaagtgtacatttaatgatcttttttcactgttgctgagaatctttggtttgaattattgaggcaggttctttcagtaagtttgagatataattgccatgtaataaactgcacatgtttttagcatacactttaagtttggacacatacacatatgtgtacatacacaccatcaagataatgaacatacctatcaaaccagatggtttcctcatgcccttttataatttcttcttctcctcacccttccctgcctgtcactctcctgatccactgatttgctttctcttagaatagacgactttatattatgtacagtttttatataaatggaatcatatagtctggcatctttcaggataattttttcagatccatttatgttgtagggtccatttcactgctgaatagtattccattgcaaggcataccacaagctatttatccatgtgttatttctaccttttggctattgcaattaaaactgccttgaatacccatatgcagattattctttaaacatgtgcttctgtttctttaaatagttaagagtggaatgatcagatcatatgttagtgtacgtttaagtttttaagagactgctaaacctttctcaagtagttatgccatttgacatttccatgagcagtatataagagttgcaattcttctgcatccttgccaattattggtatggtcagtcttttttattttgaccattttaataggtgtgtagtagtatctcatggttttaatttgcatttccctagtgactaatgatgtcttacatggtttcacgtgcttactggccttctttaagcctttggggaagagtctgttcaaatcttttgcctgtttatattggctttattttttatttatttttatttttttttatatagagacagggttttactctgtctcccaggctgaagtgcgtggcacgatcatgtggttttgcaatatttattgaattttgagagtttaaaatttgtaatatatttaatattaaacctattagtgtatttgatattaatactttatatttaatataatgtacatttaaatatataataaaacatttcattttaacagaggtaacataaatacacttcccaatttatggagtttgacttagtattgtttttaatttacaatggtgcaaacatattatgcattcaatatgtttctcaatttatgatggggttacaaattgtcaacttatgatagtttcaacttacaataggtttgtcaggacatagccctgtcataagttgaggagtatctgtattacaatatatttaatatgttgtacttgtggtacaagtacatggtgcactttgagttaaaatctttatatggcacaaagattggatcaaaatttggggttttttttttctttgtatctcattgttctagcatcatttattgaaaagactatcctttctccacttaattgcctttgcttctttcttgaaatattggttgtctttatacgtgtgtctgcttctcaactgttctgttccatatagctacttatcttttattccaagactaccctctcttgacaacttcataacttttgaagtccgatagagtttagtcttccagctttttcttttcagagttgtctttactattttaggtcagaggttggcaaagttttttataaaagaccagattgtagagattttaagctttacatgctatatatagtttctgttgcatattattttttctattacagaccttttaaaatataaaaatagttctcacattccattcaacctatacagttataggctgtgagccacatttggtcttgatgtggctgtaccttgttgacttacagctgttacaggactttcgtatttccatataaagtttagaatcaggttgtcaatttctaccagcaccaccccacacccccaaagtaattcactaagattttgattatcattgtgttgaatctgcagaataattgatgtcttcacaatattgagcatttcaacccatgaacataatatatctctccacttatttaggatttataatttttttctcagtagtatttgtgtttttcggtgtttgggtcttcctaggcattttttctctgacactattgcaaatggtattttaaaaatttcaatttctctgctagttcactactactatagaggaacacagtttttttacatatattcatcttgtatgctgcacccttgttaatttgttctggaagatttatattaacattatacttagaatatattaacattataataagctacataattttatttttttattttttaaattaaaatagagattggggtctcactatgttgaccagtcttgaactcctggcttcaagcgatcctcccatcttggcctcccaaagtgttgggattacaggcgtgagccactgaacctggccacaattttattcttaaatgaaaatagatctttgatatcatcgccagattcatatttgttttttgttttcttgagatggagttttgctcttgctgcccaggctggagtgcagtggtgccatcttggctcactgcaacttccacctcccaggtttaagtgattctcctgcctcagcctcccgagtagctgggattacaggcacccgcctccacccccagctaatttttgtatttttagtagagacgaggtttcgccatgttggccaggctggtcttgaattcctgacctcaggtgatccacccacctcggcctcccagagtgttgggattacaggcatgagccatcacgcccagctaccaaattaatattcaaatatatgttgccattacagagtgataactaaggacactttgaggtataggcatagctgtggtaaaaacagctctctccagctttgcatctaagttgtaaaataattacattgatgcttttaaacctgccatgtataatttttcaatgtattagccatttaataactctgagacagctaacatttaaataaatccctgtttgggaatggtatttgaacaaataatattgtgaacatatttgccaatttatactatattaagattctaaataatacagctatttaatatatcttgataattagtatttgaaataaatatatttctctgagtagccttttggaaaaagtgcacagaatatagtttccagtcatatgctacttttctaacttgcacttatctaaacatttcatcaggagagagttcaatagtacccgaaccaaaagtccagtgaatctgacttacccagtccccaatttggtttgcatgtctgcttacaaccatcatttctctgcagattttccacttagtctatcaaaaatcaatggtgcagcagttttttggagtctctgacaacaaaactctgtaaatctgcttcttccagtgtgagtgtctcatctaacaatctgaggataggacaaactgttgccagggacaggggaggacttcttttgagatccttggtagttttcaatgaagtctttgatatggcttacccttcctacttggtgaccctgtcctgaaaagagctggaagacaggcttcgtagacatatatgtttcatttttcttgtcttcaactttaacacccacctctttatcaaaaattccctgtaattctgaaggtaattccccctttttgatggagttcagaaactgctgacttgcaccatttgaataacttctgaaataattgttgacggtgaatccatttttccataattttatgtttacgtctacctgtttcttttgttaagtgggagacaagcatttggaaccaaccttctgagcttcctcaaaaaggctatcaacaaactattcacaatttgtttattgattatcaccaagaccttgattgtcaggtcctgtttcacaaacccagtcttttatactttcgagattatctacgtctttcattctcttttgcgttactccgagcacagcctccaagcctaggcctcactcagctcaggagccaccagcactgtttggctgcgagctccgtttggctggagcccttcagacccggagcgcctcgcccgagaccacctccggtaccccggctgcgctgctgatatcccgccggcctctctgtctccaccaagtgccaagcgttcacccacgcctgctgcctgcaagacctgaggaacgcgcatgggctttttttttttaagacaagtttcactctgtatcccaggctagagtgcagtggcatgagcttggctcactgcaacctccgcctctcggggtcaagcgattcttgtgcctcaccttctggagtaactgggactacacgcgtgcaccaccacacccagctaaatttttctgtatttttagtagagccagggtttcgccatgttgcccaggctggtctagaactcctaggttcaagcgatccacctgcctcggcctcccaaagtggtgggattatagacgtgagccaccgcacccagcttctggcagctttttagtaggttctatcatattttctactaggacaattctgttgtctgcatataaaattttttacttcttcctttccaatctgtatgcgttttgtatttttcttgttacattaaccagaacctgcagtgtattgttaaatagaaattgagagactagacattcttgtcttgtttctggtcttgggagtaaatcattgaatcttttaccatttagtaactatctttttaatcttttttttgataacacctattgggtgggaaacagtatttgtagttttttatttttatttccctggtggctaaagatttttattattttttttttctgggcttagctcgcctgaaaactaaagatattgatcatcttttcatcagtttgttgactatgtatctgtcttctttgggagaatgtctatttagatcctttgccatttttaaattgagttcttttcattattgggtttcaagagccctataaattctaggtacaaataccatatcaaataaatcgtttacaagtattttctttcattctttgtgttgtcctttcactttcttgatgatatcctttcgagtgtaaaagttttaagtttatttttttcttatgcttttggtgtcaaatctgagaaaccattgcctaacccaaggtcgtgaagtcttttatattttcttctaggatttttatagttctagctcttaaagttagttctatgatccattttgaactaatatttgtgcatgctgtgaacagtgtatccagcttcattcttctgcatgtaacacccagttaccctagcatatgtgttgaaaagactgtttatcccattgaattgtcttggcactcttgtcaaaaatcagttaaccataaatgtaaaggcttatttatttgttttgagactgggtcctgctctgttaacccaggttggagtgctgtggtgtgatcttggctcactgcagccttgacctcccaggctcaagtgatcctcctccttgagcttcccaagtagctgggactacaggtatacaccaccacgcctggctaatttttgtatttcttgtagagacagggtttcattttgttgcccagactggtcttgaactcctgggctcaagcaatcctcctgcctctgtctcccaaagtgctgggattacagatgtgagccactgtgcccagcattaagatttatttctagactctcagttcacctccattgtacatgtctaacctgtttgtaaccacactgtcctgattactgtagctttagagtaatttttgaaattgggaagtgcgagcccttctgtgatcctttttgcaatgcacgggttaaggttacttttggaggtggtagaagggatacgaatgttttaatttttttttgcacgacagttggttgaaaacagtcttttctctattggattatttgtaccttttttgaaaatgaaattgatgacttatgtttaaatctatttctgggatctattccgtttcagctaatctatgtgtctgtccttttgctaatactacactttttttttttgagacagagtctcactgtatcacccagactggagtgcagtggtaccatctcagctcacggcagcttccacctcccaggttcaagcaattcttgtgcctcagcctcccgagtagctgggacttgtgcctgagcctcccaagtagctgagactataggtgcgtgccaccacagctggctaacttgtgtttgtagtagagacagggtttcaccatgttggccaggttggtttcaacctcttggcctcaagtgatccacccacctcagcctcccaaagtgctgggattacaggcgcgagccaccgcatctggcctgcggatactatacatttttgattatggtagctgtctagtaaatcttgaaagcaagtggtgcgagagttccaacattgaccttaattttcagaatcatttgggatggtccgtgttttttgttttttcacgtaaatttttttttttttttttttttttttttgagacggagtctcgctctgtcacccaggctggagtgcagtggtgcaatctcagctcactgcaagctctgcctcccgggtttacgccattctcctgcctcagcctcctgagtagctgggactacaggcgcctgccaccacgcccggctttttgtatttctttttttttgtatttttaatggagatggggttttaccatgttagccaggatggtctcgatctcctgacctcatgatccacccaccttggcctcccagagtgctgggattacaggtgtgagccaccacacccggccttttcacataaattttagtgtaaacttactggtttccataaaaagcctgccgggatttttttttttttaactgagatttggtttaatctaaagatgaattagagaattggcgtcttaatactggctgttctgaaccatagacacagtatatctctgccgtggtctgaatgtttgcatacccgcaaaatttatatggttgaaatcctaatccccagtccaatgatattggcaggcgaggccttttggagatgattaggctaatgagggcagagcactaatgaattagattggtgcctttataaaagagattccagagagcttgctcatctcttctgccttgtgaggacacagcaagaagtcaccatctgtgaaccaagaagtgggacctcatcagatgccaaatctgccaacacttcaatcttggacttcccattctccagaactgtgagcaatacatatctgttgtttataagccatctagtctatggtattttgttctagcagcccaaacggactaagacaatctccccattaatttaggtcttatttctttcaacagtgttttgtggttttctgtattgcaccatttcattgatggtattataaatgctagttttaaattttcaattttttagtgctagtatataaaattatttatatttatatataatttatatttgaccttgaatcctgcaaactttttatagttatctattcctgtaactttttggaatattctacataaacaaatcttatgctctgtattataaaggcagttttgctttctctctgatatctgtcccttttatttctttatattttcttaatgtactggctagggcctccagtagtgttgaatgagagtggtgagaacacacatccttgtcttattcccaaccttaggcagaaagcgttccgtcttctaccattaagtatgatgttagctgtgggtttctttgaagacagctttattaggttgacgaagttcccttccactgcttgttcactgagagattttatttcattttttattttttcagcatttatttatgcattttaatttttttcttttcttttcttttttttttttgaaacagggtctcactctgttgcccaggctggagtccagtgatgcaatcataactcactgcagcttctaactttgggctcaagtgatcttcccacctcagcctcccatctagctgggactacagtagttcactgagagattttattatgaaaaccttttatcatagaaccatttcttaagacctcagagacctttagtttggtgtttgatagagtcttatgaatagatatcgtatgtagaagttcaaataaggtgcgttttcattaaccaaaagagtatctcagcatcccttctgggcattgttcccctgcattctcacagacagtggtccaagatagagaagggcctaagagattttagccatgacttttgtctaatgacacaaatccaataaaattaatggagataaatgggaaaaggttttttattgcaaaaaaaaaaaaaaaagttggcaaaagcaaggtcaactttgtccaaacaaaatggaaagaagtagtacaaaatgtaaagagacctttgaacccccaaactgcagatagcaaacagatgaaataggcctataaaactactcagttgaaaatgtttactttttatgggaaagcaagtatgattcagagtacagaacttcagaagactcactcctgtggagctgcactggtgcttgagaaacagataacatgttcctgcctgaatttaagaattgctgtgggtcaggggctgctgtggaatcccatttctccccacccatgcctttttaataggaatgtctattttaactatcccattcctgtctcaaactctgtattggttttgtggggaacagataacttgtctctttagcttacaaatgttcaaatctagaggagcaggagtatattcaagaaaccaaacccaaggacttttttatgatttttatttatgttttattgttatttttaaatttttatttttatttatttatattttgagacagagtctcactctggcacccaggctagagtgcagtggcacagtgatcttggctcactgcaatctctgcctgccaggctcaagcgatcctctgcctcagccttctgagtagctgggactataggcacatgccaccatgcccagctatttgtttttttttttttttttttggtagagacagggtttcatcatttttcccaggctggtctcaaactcctgggctcaagctgtcttcctgtcttggcctcccaaagtgctgggattacaggtatgagccactgtgcccagccacttttcaaaacattttttgagacagggtctcattccatcacccaggctgaagttcagtgatgcagtcatagctcactgcatccttgaattcctgggctcaagtgatcctcctgcctcagcctactgagtagctgagactacaggcacatgccaccacacccggcatgtgtttgtggggggtaagaggggtcttttttgctgttcttgccagggttggagtgcagtggcacaatcatagctcactgcagccttgacctcctgggcccaggtgatcctcctgcctcagcctcttgagtagctgggaccagaggcatgtgccaccacgcctgactaatttttgtatttttttgtagagagagggtctctctctgttgaccaggctggtcttgaactgctggactcaagggatcctgccacctcagcctcccagagtgctgggattacagacgtgagccactgctcttggccgtcttttctggattgcaccttatttggatgaccagatcctggacataaaaccagagtctactaccacgggcatgagactttggtgtggccttaggaagtggtgagagtttcttgtacatgggaagtataaatattaataatttgtagccacatgcagactccgatggttttaaaacacggccctaaaattctttgatacttttacctcccccttgtatctgcactgacctttgactgcatttcccaaaggagtacaacataaatgattccatgagatttccaaagcaaggccacgaagggccatgcggttcccttctggctggaacattccctcttgagatgcttcctcctctcagagtgcttcctcttgggaactagcagctatgctgtaacagggaggggttacatgtagatgctgccatcaacagccaccagctgctgtctgttttttagccatttcagggaaaacatcagatacaagagtgataatagaatccagatgattccagcccccagcctttggattcagcatcagctgtgtaagacttcccagctaggccctggacattgtgaggcagagaaaagccattcattcctcctgtatcctgtccaaattcctgccccatgatctgttaacataatagagtagtagtggttctgtaccagcagttctcaaccttttttatcttgagactcttttatactccaaaaattgagcaccccaaaaagcttttgccaatgggcattctatctgtgaatatttaacattttagaaattaaggcaggccaagcatggtggctcttgcctgtaatcccagcactttgggaggctgaggccggcggctcaactgaagtcaggagtttgagaccagcctggccaacatggtgaaaccctgtctctactaaaaatacaaaaaaactagccagcatggtggtgtgtgcctgtaattccagctactcaggagtctgaggcaagagaactgattgaacccagggggcagaggttgaagtgagctgagatcatgccactgtgctccagcctccagcctgggtgacagagcaggacttcatctcaaaacaaaaggaattggggcaaattttaaaaatattttagtaatatacataacatgctttttaaaaataacttttccacaatggcaacaaaataatgtggaaagagcgacatattgcatgcttttgcaaatctctttaatgtcttaagagcttaatagatgacagctgaattctcatacttgtttctacattttttgccattagttgctttgattagaaagtttggctttgctgagatacgtagttggaaaagagagaagcattttcaggtaattttggattttctttgatattacaccaaaactcaagaaatggtagtttctgaaagattagttgcaatatggaatgaaatcctgttaaggaattgtttctattctgttacattaaaattcatttgtttgtcttgcactatttttttcttttccttttatttatttatttatttatttttgagacagagtctcgctctgtcgcccaggctggaatgcagtggcgcaatctcggctcactgcaagctctgcctcccaggttcacaccattctcctgcctcagtctcccgagtagctggggctacaggctcccgccaccgcgcccggctaattttttgtatttttaatagagacggggtttcactgtgttagccaagatggtctcaatctcctgacctcgtgatccacctgcctcggcctccgaaagtgttgggattacaggcgtgaggcactgcgcccggcctttttttttttttttttttttgagatggaattttgctcttgttgcccaggctggggtgcaatggtgcgatctccactcactgcagcctccgcctcctgggttcaagcaattctccagcctcagcctcctgagtagctgggattacaggcacccaccaccacacctggtgaatttttgtatttttagtagaaacggtttcaccatgttggccaggctgctcttgaactcctgacctcaatctacccgctttggcttcccaaagttctgggattacaggcatgagccatggcgtccagcccatatcttgcactttgattggctattttatcaatgcatgattttataccttaatacctgacttagaaaatagggctggcacagtggctcttgcctgtaatctcagcacttcgggaggccaaagtaggagaatccttgagtccaagagttcgaaagcagcctgggcaacatagtgagaccctcatttctaaaatgaaaggaaatagtcatttacttcattatgcagatctttcaaatgtttacccattttaaagtacagtgtctaaaataaaccttcatgaacatgaccattgatcctatcagaaaagtttttatgcgttgagacgcttctaaggtgacagatctaagctttccaacttttgctgttccttcaaggacatttttatttagcctgagtgtggggcagtgaggcattcagtgactgcgcagttcagtgccactgccttaattttttttttttttttttttttttgcgatgctgttttgctctttttagccacaggctggagtgcaatggtgtgattcggctcactgtaacctccgcctcccgggttcaagcgattctcctgccccagcatcctaagtagctgagattacaggcgcatgccacaatgcccggctaattttgtacttttagtagagacgggtttcaccatgtttattaccaggctggtctctaactccttacctcaggtgatccacccaccttggccttccaaagtgctgggattacaggcatgagccaccgtgcccagcccactgccttaatttctgctgaggcaccagcgcttttggccacttttataatgtgtcatcagtataaatgtggatatggtgaaaaggtcaagaatgtatttgtgctattataacaatagttttttttttttgtttttttgtttttttgagacagagtgtcgctctgtcacccagggcgtgatctcggctaactgcaagctccgcctcctgtgttcacgccattctcctgcctcagcctcctgagtagctgggactacaggcacccgccaccacgcccagataattttttgtatttttagtagagacggcgtttcactgtgttagccaggatggtctccatctcctgacctcgtgatccgcccgtctcggcctcccaaagtgctgggattacaggcgtgagccaccgcgcccagccataacaatagttttaatctcacagaccgcctgaaagtgttttgggtccctcagcagtttaccaaccctgagaactgctattctgtatcacttaagtttgaagtggtttttttacacaacaataataatcagaaccgaactcatatcccttttttcttcttctttttgattattagtttcttcagtgtactagatggctgactgggaagattccagggtcccaacaggcttcagagttgcgaaggctctagaggtactgtttgctcacatagagcctaggtgttgagggcttagactctggagcccagctgctggaatgtgggccctgcagctgttactgttgagctgtgtgtctggagcccttcccttagcctttcctgagtctcattctccgttggttaaatgatgtcattaataaggcaaatgattttgttgctaaatgccagtggaaactttctaatagtcataactgtcacaaggtctgatgacctcacagttattttgcccttaacggatgccataaaatgcccgaaaagctttcccggggtcaactcacttcattacaactccctgagggagtaccattgttaatgtcttatgtggtctgtgtactatgaaatatccaccaccatctctgatggattccagcgcaccttgtttcacttgagtctgtccagtctttagagttaacagaggaaccctagttactgattccagactttgacctcatccaaaattaacagcagccaatttgcattcttctgggttatatattgttggccaaatattcagaattattgtgtgcctctgggcagagaactcacagttcaaaatatcttttttgttttcctttggtacagggtcttgctctgtcacccaggctggagtgcagtagtatgatcatagcttactgcagcctccacctcctgggttcaagtgatcctcccacctcggcctcccaggagctgggactacaggcacaaatcaccatgcccaaatatatatatatttttcaatctcctatttctttcctctctcttgttttggaagttactcagcaagctacatctgtctaattggatatgtatgtccatatcctgttagaatcaagtatttcagagtataagcatgatagtaataaagctcgcaatattatcattaagccacttactttagagatcccatgatgaacccaaagtctcccctattgcggaccctggagaccggttaagtctaggagaaataatatcaagatttagactgatctttttttccccaatctctttgcctctgagtaaccattcttcaaattcagaaccacactcagggtaaaatataagtaagggctatttatttttttgccactgttttggcatctgtagacaatacagtttatttaatttcaggttttcacagttatgtacagtcatacctcggagatatgtgagttcgcttccacagaccatcatagtaaagtgagtcatacaaattttttggtttcctagtgcatataaaagttacgttggctgggtgaggtggctgtcacctgtaatcccagtgctttgagaagctgaggtaggaggatcacttgagtctaggagtttgagaccagcctgggcaactatagcaagaccccatctctacaaaaaaaatgttttacatcagtcaggtgtggtggagtagctgtagttctagctattcaggaggctgaggcaggtggattgcttgagcccaggagttcaaggctgcaataagctatgattgtgccactgcattccagcctgggtgacagagtaataccctgtctcaaaaaaaaaaaaaaaaaaaaaaaaaaatgctgagcgtggtggttcatgcctataatcccagcactttgggaggccgaggtgggtggtggatcacctgaggtcaagagttcaagaccagcctgtccaacatggtgaaaccccattctctactaaaaatgtaaaaattagccaggtgtggtggagcacacctacaatcccagctacttgggaggctgaggcaggagaatcacttgaacgcaggaggtggaggctgcagtgagttgagattgtgccatggcactccagcctaggcaacagagcaatactgcatcttaaaaaaaaaaaaaaaattatagtctattgtgtgcagtagcattatgtctaaaaaacaaaggatgcaccttaattgtaaaatactttgcttaaaaattctgacagagaaacaaagtgagtatgtgttattggaaaaatggtgctagtagacttcatcagtggccacaaaccttcaatttgtaataaccttcaatttgtaataaaaataaaaccccacacgttatctgcaaagcacaataaaatgaagtatgttacatgttgattttcaggaattagaagaaaatgagagtattgttgtcatcggaaataagaggattgttttgccaagctactgaaaaaaaaaaaaactttcattcctttgtcaactgcaagaatggtaatatttgacaagaaaaacccaacttgtcaaatactacgattcttgcagttgacaaaggaatgaaaagttaatagcatatgtgaggctggacacggtggctcacacctgtaatcccaacactttgggaggccaagacgggtggatcacctgaggtcaggagttcgaggccaacctgaccaatgtggcaaaagcccatctctactaaaaatacaaaaattagccaggcatggtggcaggcacctataatcccagctactggggaggctgagacatgagaacaggttgaacccgggaggcggaggttgcagtgagctgagattgcgccactgcattccagcctgggcaacagagggtgactccgtctcagaaaaaaaaaaaaagtatatatgagcatttaacaaggctataggttttgattttgagccctgaaaacccccaggtttagtttcattgggaatttgtattcaaacatgtctctgctctggatccataggtggcacaattttgccagtttttgatgcataaatggtgacagtatcctttaacaaaattcctaaagtagtcttttaaaaaaataattctgaaaatctggccaatgataatacaggactcggaagaaaatactacccattgaaattggaaagcctgttttcaatttggggtctgctttttttttttttaattgctttaagagattaaggattttagacacaaacacgtcataaagtgtttttagatttgcatgaacctactgtggtttagtataaataaacccctaacatgagtgttacagatgcctgtgagggtatcttgggggtttctacactgcctaccccaaacctgactgcagtcagagccaacagggccccacgtaggcaaaggctatgtcattaattctcaaatgagattcgtccaagcgggaaatgcacatctagtgcagtagttttaggccagcctttttcagagcctcaggctctgcctgtcaccttgaagacatccatgtgggtcccctcagggcttctctttgccataaaaataaaatgattgctcccaccaatgtttgcgtccatgggagaggaggtaggagcagcagtacttgtcctgtgtgtgggagacacttgaagggctcagtgggaattgtcagcagcagggaacagaacaggtggtgagaagagtcattccactgagtttctgggcctttgactccctgaaacttccttctcctctatccaacctccctctccagaaaaaaaaaaaaataatttaaaaatggaatcagtgtaatcagtgaagtagctgtattccagtgaacaagcagcctgcccttgcatctgcatgcatgcagccttggcgttttctctagaaaaaagagaggttctacctcgtgcatgaatacaggtggaggccaagaccagcattaacaaaggctgtgtgtttgccatggagctcaggagggctaacagtcattttacttctgcctccgaccatcacactttgtccccagaacaaagccaagagtccttggtcaatgaaagtgtgtaaatatcctcacacttcccctagtagttcctttttaggctgtaatcatgtgctaaagaaaagaacctaacttcttaaaatctttccctttttggatgtagattgaaatttttgttttaaacacaatggccctaatgtctaaatctaatgttagtaattaatccctagtgctttaaggatcttctgtttataggcagttattttatggagctggtctctgtgagaggcacagactgccaggaggggttgagatttcctttaaccaggattcttagttctgaatggctctagtgaataacattaacaatgattctctggccgggcactcacgccggtaatcccagcactttgggaggcctagacgggtggatcacttgaggtcaggagttcaagaccagcctggccaacatggtgaaaccccgtctctactaaaaatacaaaaattagccgggcatggtggcagccgcctgtaatcccagctacttggtaggctgaggcaggagaattgcttgaacctgggaggcggaggttgcactgagcccacagtgcgccactgcactacagtctggatgacaagcaaagctcaatctcaaaacaataatttttaaagtaatgattatcttaaccattcttaaatccttctgtctagtaggaatcttattcatgggagtgtctggaaaagggacaaagagcggctattgagatttttttaaagcctggatttgggatgtctgaacagtgaataactccaaagccatttaaaaatcatctttttttctaccaccggactgagcttttcagttttaattccaaggttccaatcatatagatgtgagtcaaaccctgttgggccaaacaggatctcctttgttggcggataatttcaagtgctcacagagaccctccgtttttttttaaatacctggacttaattgtttaaactggagtccggaccaaaacatctctgacctcgggggtcttcctttggtcaggaagaggggagggagcaattggacccctttccctctgcggctgcagagtccaattttcctctggggacatttgctttttcccttggggaagacagtacggattctagttctgtggactcttttacttagctttgagacccaagcaagttaattggcttgtgcctcttattttactctaatgcaatgaataaagacagtcccagccttcgccctaagggagcaggagcacctgcgatgccccgttcccaagtcctcagggcgaatccgccaaatgtgcgagctgggcagcccacccctttcagctgctggccggaagcggaagtgggcgtccgtcgcctcgccatctcccatagctgtcgcctgcagctgagaaagggttgctgtcccagcaggccaggtccaggtgcgccccactagtgaggccggcggaatcgggagggaaggggtcaagggcacagtgcgcagccccggctgctccagaccttgcctgcagcttcccgccccagcctccggctatcgcggcgtttcttctcagaggccgccggctttggttcctcccggcactgctgggcttggggctgccattccgggcattggttcccgggaggaggcaagtgggttcatgtggtcagagtgcgtcggcggggccttttctccactttctgtacccttctctttaaacgtcgtccccagtaggagactattttttctcaagaaaatgctctcttggacctcactttccgttgttagaaggcatatcttgggatgcgcgttattggtttgtggagatcgtccctttttttcccctctgttatgtggatgcaccctagtgcctgatacacatttgagttcctatctgagtgggcttgtgcatgttttttcgtatttgtggacttaggtcttcaaggtttatttttgaaagtcaagttgttgggtcaaagcataaatgaatgtgtaattcctaggtatgaccagatccccctctatgggacttgtgcttttttgagccctcagggtgtgttttgtatgcagcaagcagcagaccttagttttcagtttacctgtagtttcttttggatgtttacatattgacatatcgtttatgaataagaactttattctccctttataatcctattacgacccactcctgccctacaaatttactgccctgcctacgacctccgaaacattagaaggagcaatccttgctgccttccaggtctcagaaagaaagctttcagcttgtcactacttacatgtttgctatgtgtttttgatagattaaagacattcccttctgtaacagctttattgacataaaatcatatatttcatctcatttaaagtgtataaatcagtggtttttagtatattgagttgtgcaaccatgactacaatctaactctagaacattttcattgccccaaaagagaatcccatactcatcagcagttactcccccatggttggcaagtttttgggctctattcttgagtttttttatgttgtcatacaccaggtcagattgatttaggtaaaaacaacactcttcatttaagaatatacagatgttctccttttccagcagtaagtcaaggcctcggcggttttggaggacaactgcagctagagtcaacttgggcctggaggactgatgaagtttgtgatatgactgtgatgctagcagagaattcattagagagactatggaaggtcctgacagaggttgaaatgcctgctattccagtaccgagagcaatagtggaggcagaaagtcttaaactgacaagggaattagtggaataactctttttgtcgtgtcggtgtcatgaggggaacagggagctcttcagtcctatttgcaaattgcattttgagagtaaggaaaactagtgtgcatgtgcctgtccaattagcaggtagacacatgtaggtagaggatccacagaggaaaaagagaccttgtgcgaggcaaaactggagatgcaaagtaaaaagatgaggagtgctgaaaggggtgtcttgtacttagaatcctagggatccagctagggcggcagtcgtcagaggttgtaatggggactgatgaggtaattgcgtcgagggggaggttcgattttcatggtgtatgagaaaacgtcgagtatctacaagcaacctttcactgttattttcagggctgggtataagtaagcaagaagagggcctgggagaagagtctgacgagcaaggggaaggtagccaaggatggagtgaaatacagggtaagtgtcttcctaagcaataattactgctaatgtttttaagtttgccactactgatagagggcttgtctgtaatatggagctggaaggctccaattgtttcagtgatgtgtgtagttgggctttggagatgaagagtaaaggaacatcgagaaggtgaaagtttacctaggggaattccagtgggtctttgctgagagatacataaaggagctgccacaggaatagtagtttgtgttgtgagaggtctaaatatggggggagtagagttgatataaggaggaaggttttaggtctttaagaacacaggctaagggagaagggggaatggagggcagaagcttgcccatagtgaaggaggcaagcccagaaaaaagagagagtagagacatggagagaaggggtgggggcttcttgtcctccagaaaagcagagaaggggtagagacacagagagaagggaccggggggttcttgcaccccagaaaagtggagaagggctagagatatggagagaagggttcaggggttcttgacccccagaaaagcggagaagggtagacacatggagagaagggggtcagggggttcttgcccccagaaaagcagtacttgccgctaagggtgaaggaccaaggcaggcatccccacgtggtcagacacctctgaaatgtgggtgaataatcaggcaggcgtccccgcatgattaaacaccaagggaagactgtcttcccgagtccatgaccggcgccggagttttgggtccatggataaaacacgtctcctgtctacgagaaaaggaaaggaactgaaattgagagaagggagagattgaagtgtggcgccaagattgaaatgagaaagaggttgagggatagtaagagaggttggagaagagagtaaaaagaggccacttacctgatttaaaattggattgatgttccttggctggtcggtctgaggacctgaggtcataggtggatctttctcacagagcaaagagcaggaggataggggattgatctcccaagggaggtccccagatctgagtcacagcaccaaatctacctctgtcgccaggctagagtgcagtggcgcaatctcggctcactgcaacctctgcctcccgggttcaagtgattctcctgcctcagcctcccaagtagctaggattacaggcatgctccaccacacccggctaatttttgtatttttagtagagacgttctttcaccatgttggccagagtggtctggatctcctgacctcgtgatgcgcccaccttggcttcccaaagtgctgggactacaggcgtgagccaccgtgcctagcctcattcctttttttaatgagacaaggtctttctctgtcacccaggctggagtgccgtggtgccctcgacctccctagctcggccttccaccttagcctcccgagtaggtaggaccacaggtgtgggccaccaagcctggctatttttttaaatttttggtagagatgagatctcactgtgttaccaggctggtctgaactcctgggttaatgtgatccacccactacagcctccctaagtgctgaggattacaggcatgagtcaccatgcctggccttcattttctattgtcaaatgatagtccattgtatggatataccacattttcatttatccgttcatcggtagatagacatttgggttgtttctcctttttggctaatatgaataatgctgctgtgaatatttctcttgggtatatacctaggagtggaatgccttgttcatgagacgaacttttatgtttaatcttctggtaaaatgctaggctgtttgccaacgtggcagcaccacttcccacttcactcccctccacaaaaaaacaagagaatttctccacatcctcatccacacttgtctttttaattacactcaccttaatgtgtgaagtggtatcttaatgtggttttgatttgcatttccctggtgtctaatgatgttcagcatcttttcatgtgcagttgacctttttatctttagaaaaatgtacattcagatcatttgcccatctttgaattgtgttttcaaaagtcagctgaggctgggcgtggtggctcacgcctgtaatcccagcactttgggaggcccaggcgggcggatcatgaggtcagcagatcaagaccatcctggctaacacggtgaaaccccgtctctactaaaaatacaaaaacatagctgggtgtggtggcacgcgtctgtagtcccagctacttgggaggctgaggcaggagaatcacctgaacctggcgaggttgcagtgagcagagatcgcaccactgcactccagcctgggaaacagaccaagagtgtctcaaaaaaaaaataaaaataaaaataaataagctggctgaattaaattcagcccgaaagttttcaggttgaaaaaatttatttttgaaatcattatgtgatactggtttttatcactttgagttgatcatacaatttttcttttgctctattaatgaagcaaattatattgattttctaatagcaagcatctcttgcattcctctggtaaacctaacttaattctgttgtactatatttcctatttattgacattttttgtttggacttattttccttagaatatctgaatctatgttgaaatttgcctataattttgtttacttaaagtggccttgtcatgtttgatatcagtatgccaatctcaaagaatattcttccttttatactcttaatcacggtaatccctttgataagttaaactgttttgtgaaattagtttaaaagtgaccatatttttttcccttgtaatattgtaaactgctgttaatagaataaccaaaggcaaacatgacattttgaaccatacacaattctggggtttgcataaaggctatattaaataaaaccttccagatacccagctcttgcctatagagtggataagttatctatacctgaaataatgcaaacattagtgacaaattacattgaagtgtagtttaagtaaccagtcttcataaatatgcctaatctctggaatattttcatccagactggaattctttcttctttgagtggcataactgactgataaagcctttgagcatggtgttttttggtgaaaacctaaataatctagttttgttttctgttttaaaagaatatctgggcagtgagttaagctgggaagacctagcaccttgctgacgggatcagtctagattcttcttttatattttttaaattgtggtaaaatacctaaagccaaatttgccattttaatcatttttaaatgtacaagtcagtggcattcattgcattcacagtgttactcaaccatcaccagctagttctttttattgtaatttctacacagttttggtaagttgtatttctgtaggaatcaatttatttcctgaaagttttgaatttgattaaagttattcatgtcttgttaatctctgcaacatttgtagttgtgtttttctccttttgtctttgaagaattttgcccgatttttttcctagtagttttcaaagaaccagtttgtagcttgagtgatactgttgttttctagttcatcatcgtattttctgctcttcccgttccagctgcttaagttaatttttaagttcacttcttttctaatataaacatataaagcttatttttttcctaaggaccagtttagctacattctacaagttgtggtacttagaactaatcaataaccatagtattatgtattttctaattcaattcttttataaaagcataagttatttggaagtgtgatgttttctgaattccaaatgtgttacttttttctgtttgcttgaaaaatatgaaaccactaatattcaaccatattttaaaactaccaaaacacccatttcatatagttcaatgtaatctcgttattaacttacaacttagttacattgtaattaagacatgtcagagaacatgtttgtataccaaatctttttctaagttttaatttttgtgggcacatagtaggtatatatatttaaggggcccatgagatgttttatataccaaatttggaaggtttaagactggctttacagtatattcaccatacagtatggtcagtttttataaacacttcatgtgtgcttcaagaatctatgtatactccatacattcagtagtgtccctcagtgtgctagattaagcatactcattgtgttgttcaaatcttcatatcctttttttcatatgatctttctattgctgagcagtgtttgaaagtcttatagtgatgatttgtgttatttatcctttaattgtgctagcttctgctttataagttttatgagactagaattttatatcttcctaattggtactttacatcctcatgtcattacctctaatagtgccttttgtctcaaaatctatgaaattaatttagcaaacaaactttattttggttaatattcacctggtatatctttcttatttttgagactcaatttttatgtgttgttgtggattttagtgcatctaatgaaataacatagagctagtttatcttaatctaccaggacagtctgtttttaaactgcagaatttagcccatctgtacacttactgttattgatacagtcagacattttttaccatcttacattttacattgtgcttttcatttgacctattttttttgtttcatttcccttatttttcttacctttggaattgagatttttttttaacctaattccattttctcttctagactgtgagttaaactcactatgtccatcctttgaattgttaccctagctattttatcatgcatacttacagtctaaacctaatcaatattgtgagtccccagtggaagaatacaaggaacatactactcaatcacctccttcccaatttatatattatttagtattaggattgagcttatttttccatgtcacgaatttggtattattaccattttatataataaaggtttgcttaattttatccattttacctttgttcattctacttaacattttgggtcttccagttcctatctcctgaagtacttttaagttacttctgtgatggtctttttggatgggtaagttgtctcaggtctttattttaaaatgcctttatttgactctccatttatttttcttaagcttttaatcatgaaaatttttaattctccacaaaagtagaatagtacagttgtctctcatatccatgggggactggttccaggacccccacatggcttccaaattccacagtcacaaattccttatataaaatagcattgtatttgcatagaacctacacacatcctcccatagatgctattttttccctcccatttactttaagtcatcactagattacttacagtacctagtacaataagtgttatgtaagtggttggtttgttttttttttgttttttttttaagagatggggtctcattctgttgctcaggctggagtacagtggtgtgatcatagctcactgcagcctgaaactcctggactcaagtaatcctcccacctcagcctccctagtagctgggaccacaggcatgcgccaccacgcctggataatttaaaatagatacatatttttgtagagacagggtgctgctttattgcccaggctagtctcaaactcctggcttcaaggcatcctcctgccccagctttccaaagtgctgggattactggtgtgagccactgtgccgggccataaatagttatgctgtattgtttaaggaataatgacaagggggaaggtctacatgttcagtacagacacaagcattcatcttttttccacatatttttgatctgtggtcgagtagccaacagatacagagggctgactgtataatgaattctcatgtccttaacacccagctttgacagttaccaatattttgcacatcttgcatcatctagcgctgagctgtccaatacagtagccactagcctcatgtggctattgaagtttaaatgctcatttcaagtattcagtagctatccgtacatgattagtggttactgtattagatactgcaaataaatattgaataatgctgggttttccccccagatttgtttttaaagcaaattccagacatcctgtcatttcatcagtatattactaactgtgcatctctagttggttcatcaccactactccattatcccacctaacaaagtctgacgttccctgattggctacagaatatctttttacatttggtttgttcaaatgagaatcttaacagggtcccaacattttttttttattttagaccccttaagtttctattgtgtctgttctcttcctcctcccttttcatttttttaatccactgatttattgaagaaataaagttatttgttcttaaaatgtcccacatcatatatggattttgctgactggtttgttttcattgcttaacctggttatctttgtatttcttataaagagtagttagatagtttgtctagcgttttaggttgataagttatttttttctcagcatactgaagacattgtcctgctttcttctgacgtccattgttgctgttgagatgtcagctatcagtctgtttttccttttataggtgacctgtgtttttcccctggctgctttggaaattatgggaaaaaatcaaataccaaggaagaaaaatctataatgaaattagatgtggatttctttttatgtattcagcttgggggcttatgatacttctagtacccaaaggttagtgtctttcactaattcaagaaaattgctaggttttcatctaatagtgcgatcaaagttctgatctggtagttaatactggcactgaatttctcatttcagtgagtttatttttcatttctaaaaattgttttttaaactaaccattttatagtatcttaatctatatccattcaaatttttattaagcttttatatattttaaaatatatctaaaagggtaatatccaaagtgttatgctttttaccacctgacacctgtgtgttagctatgtcttacacatggtacattgtgtatttgtgtttcacaatttcttaaactgtgccttcctcaatttacttagaactttgtatataagattttttctcaagacctgacttaaagttgattttccagagataggtcgatttgcttgcactagttgcttggggacaatgccacttaggaccctctttaagtgaaattattcccttgaggttgtttgaactacagaaatgaatttggactgaaatctaaaagagagcacttgtgtatacagatcctcaagagagatttgctttttattatacctgatgggtacagttccttgcttcacgctttcatatggaaattttactttctttttaaaaaactgttcactgtggattttcagtcatacctaggaatagagtgctataaagccactatgtacctaccacccagcttcaatgattgtcaccattttgccattcttattacatctgttctctcccttgcttcctttcatcattgagctttcttttccttttttttttttttttttttttttgagatggagtcttgctctgtctcccaggctgaggtgcagtggcatgacctcagctcactgcaacttctgcctcccaggttcaagcaattctcctgcctcccctcccgagtagctgggattacaggcacctgccaccacacctggctaatttttgtatttttaatagagaaagggtttcaccatgttgttcaggctggtcttgaacctcctgacctcaagcaatccacccaccttggcctcccaaagtgctgagatgacaggcgtgagccaccacaccctgccagttttgtttttctgaagcatggttttccagctttcttgaggtataattgacaaataataaaaattatatatgtttaaggtgtacaacataatgttttgatctacctgtccattctgaaatgatcatcacagtcaagctaattaacatatccatcccctcacttacttttgtaagatgcactctcttggaaaatttcaaatatacagtacatcattaactatagtcaccaagccatacatcaggtctccaaaactcagccatcttataacagcaaatacatacccattgaccaacatctccccatttcccttgccccttggtaatcacctttctaatgcttctaggagtttgacttttctagattccatgtaagtgaggtcatgcggtatttgtctatgtccgccttattttacttagcatgatgttctccaggtttccttcttttttaagactgaataacccactgtgtgtatatatatgacattttctttacgcattcagcaatcgacaaacacgttgtttccatatagcagctattataaataatgctgcaatgaatatgaggtcacagatacctctttaagatattgatttcacttcctttggttatatacccagtagcaggattgctagatcatatggtagttctatttttaatattttgaggcacctccactactgctttccataatggctgtaccaattttcacttctaacaacgatgtataagggttccctttctccacatccaacacttgttatcctttgactttttgataatatctattataacaagtgtgaggtagcagccaactatggttttgattggtacgtccctaataatgtgatgttgggcactttttcatatacctactggccatttttatttcttctttggaaaactgtctatttagatcctttacccattttttattccatttttttctatcgaactgtatgtatttcgtaaatattttaaatattgtgcagattctttctcccattccataaggttgctttttcattttgttcattatttcctttgctgtgcagaaactttttagtttgatgtagtttcacttatttttgcctttcttgcctgtgcttttggtgtcaactctttaaaaaaaaaatttgtcaaaattaatatcaaagagcttttcccctgttctagaagttttatgatctcaggtcttacatttaagtctttaatccattttgagttgatttttgtttgtagtttaaggatctaatttcactttttcacatgtggatatctagttttccttacaccatttgccgaagagactgtcctctccccattgcttattcttggcatctttgtccaagattagttgaccatacatgccagggtttatttctgggcttcctattctgttacatttgtctccgtttttatgccagtaccatactattttcattacagtacctttgtaatatatttgaaataaggaagtgtgatgcctccagtattgttcaagattgctttagctatttggagtttttgtgtttccatatgaattttaggattgttttttctatttctgtaaaaaatatcattggaatttcataggaattgcattaatttgtagatcacctttcatagtgtgacatttgacaatattgattcttccaatccatgaacactgggtggcttcccatttgtttgtgtcttctactttcaccagtgttttagaattttcagtgttgagatcatctccttggttaaatttattgtcagtattttactctttttgatattattataagtgaaattattttcatagttttttttagatagtttgttagaaatacatttaatttttgtatgttgatttttttttaccctgcattactgaatttacatgttagttttaacattttttcatggtgtctttagggttttctagatacaatatcatgtcatctacaaacataattttacttcttttccaacgtagacgccttttgttttcttgcgtaattgttctggctagaacttcagttgtatgttgaatagaagtggtgaggatgggcatctttgccttgttcccaatcttagaggaaaagctttcaattttttataattggctgtaagctgtggttttgtcacctatggcctttactggtgttgaagtactttccttctgtaactaattcgttgagggtttttatcacagaagaatgctgaattttaccaagtgctttttcttcatctattctaatgatgatatagtttttatccttcattctgttgatgtgatgtatcacattgattttgcgtatcttgaactatccttgaatttctgggataaatctcacttgatcatggtgtatggtccttttaaggtactgttgaatttggtttgctagtattttattgaggagttttgcatctattttcagtagggatattggcttgtagttttttgctcttacagtgtttgtctggctttggtatcagtgtaatgctgacctcataaaatgagtttaatgaggagtttggttgggctccttttccatttttttggaagagtttgagaaggattctttaaatgtttggtagaattcaacggtgaagccaccaagtcctgggcttttctttgatggaagatttttcctcactgatttaatctccttactcattattgatcttgtcaggttttctatttatgattcagtcttagcaggttatatatttctaggaatttattcatttcttctaggttatccaattttttggcatataatttttcattatggtctcatgatcctttatatttctgtggttatcagttgtaatgccttctctttcatttctagttttacttcagtcttgtctattttaatcttaagtagtctggctaaaggtttttgttggtttatcttttcatacaaccaacattcagtttcatcgatcttttctattgtcttcctagtctctcatttatttctgctgcgatctttattattatttccttccttgtactgactttgggcttagtttctttttccttctactgactttgggcttagctgctgctttttctagtaacttgaggtgtaacattaagctggtataagatctttcctactcacccttgctctctttggtttccatttacgtggaatgtcttttcccatctttttactttcgggctacatgcattcttaaagctatagtgagcttcttgtaggcagcatataccttaggtctttcttttttaatccagtcagccactatgtgttttgactagagaacttaatccatttacttttttgtttaaggagatagggtctctgtcacccaggctggagtgcagtggcatgatcatactcccactactctcagattcaagcaatcctcccaccctagcccaccaagtagctgggactactggcagatgccaccacacccaaataatttttttaaattgttttctgtagagatgcggtcttgctgtgttgcctaggctggtctcaaactcctgctctcaagtgatcctcctgcctcagcctcctgagtacatttatatttaaagtaattattgatgggtaagtacttactgttgcctttttgttcattcttctgtggctgttgtacagatgttttgttgctttcttcctcccttgtcttcctttgtgatttgatgactttctgtagtgatacgctttgatttctttctcttttctccataatataggttcttgctttgtggctactatgaagcttaaaacatcctgtagttttaatagtctgttttaagctgttaacagcttagctttgattgcatacaaacaatttatactcttccatttcccacattttatgtttttgatgtcacaatttacatctttctatattgtatattaacaaattattataactttttaatatttttatcttttaatcttttacactagagataagttatttagataccactgttacagtattagggtaatctggattgagtatataattacctttaccccagtgggttttataatttcatatggtttcatgttactaagtgtcctttcttttaagctgaagaatttactatttcctataaatcagctccattactgatgaagcccctcatcttttgtttgtccaaggaagtttttatctctccttcatttctgaaggccatttttggcaggtaaaacattcttggttggcagtacagtcatgcactgtgtaaagacattttggtcagtgatggtccacatatgtgacagtgctctcataacattttaatagtgctaaaaaattccaatcacctaatgacatagccagtgtaacattgtaaagcacattactcacatgtctgtcatttaaacctgctgcactgccagtcatgtaacagtagtaaatatggttatgtacagtagattatatacagtacataataatgaatagtaataagtgaccacattactggtttatatatttttatactatttattgttattttagaatgtattccttctacttactaaaaaagaaaagttaactcaaaaacaagcctcaagcagatgcttcagaagacattctagaagtcattgtcaccataggagatgtcagctccgtgcatgttattgcccctgaataccttaagtgggacacggtagaaggtgtcagacagtgatactcaagatcctaaccctatttaggcctagattaatgcgtatgtgtcttcgtttacaacaaaaaagtttaaaaagtaaaatcgggcaggcaaaaagggcctggaaggtaggctactgagttaagaagacagagtcctagctctgctataagatttgcagcactagattttgatacatatacagctaagtgtactaaatgttgttctggaatgtcacccttttattatgaaatgcaaatatgctcacctttatggtccttatgagttactccttattgttctaagtaatttcgggatattaactcagcccaaccctatgaaattggtcccattctaacaatgaggaacgtgagggtgtgatataagatattccaaactcatcttgaagatttcttagtctatactagactcagctatttctccagtgagtcctggtttctgtcacgggtaaatgatattcagagacagttttgcactttagaggctcattcctcctgagctgttagcagtcataagcctttttagtggttcaggctagaaaaaagtccaagaaaaaatgaaaaatgcatactatatttctaatttgaggatatactgtgttcttggataaggaggcaaattgtaactacactctatgtgtatgttgttaccctttagtaagaagaagcttcccagcctgctagtgttgaacatctagcaggcctagactctaatggcttctgtgttctcctctagctctgcctgcttaggactctgcccagccaggaaggaaacctacaggaggaagaatggctgcagggtggctgacaacctggtcacaggtacacaagaaatttctctatttccaaaagcacactgccattcctgaaaagaacacatctcttgcccctgacctgaagcttcacagcccaatctgagctggcttcatcttccgcagctcccaggctgcttcatgtggaagagggaatccctgggaaaggcttctgttcccacatttgttaactttctccagatattcttccatatttttgagtatgaattccatactgtagtgagtgctgtaaagaaagacttttactaggaaaattatttatcatttctcaagtatttcttgcattcctacagtatgccctgtctatactggatctgaataagacgaaaagagtcctcacaacctaactgtgcaaagatcaagccaaccatattttagaaaagctgttttgaccatgaccctgaatgagatggcccagggagtaggatttaaagagagttctgagaactcagctttaaggcaaattaagagaaggcctctgatgcatgtctgagcttccagtgccctgagtctcctctccagtcctgtcagcctcacccaccattctcctggtacattgtcaaaaatggtcattggctgagccagaatatgtatgtgatgttttagaactcagtaaccttccaggaagtggcagtggacttttcccaggaggagtgggcattgctggaccctgctcaaaaaaatctatacaaagatgtgatgctggagaactttaggaacctggcctcagtaggtaaggctggcctcatttcttcatttgtttatgtagcaaatagttcttaagcacatattatgttccagaatctgtggaaagaatagcaatacagtggttaaccccaaaatgaatggtccctgcccttgagggggcagtccagtggcttcccatgaaaatgcactgatttcattttctctatcactaatagcttaaggtaatttgcaatctgtgtctcatcttgtgtataggtttcaagggtcacttccatatagggcgtggaccatgctttttggttcttgtgaaagaaagagctcggctctgattgttttgttgttcctaaagctgcacttgactattttaataatcctttagttaaagccaaagtatggcaatcagttttgtggaatatttaattctcacacatttctcccacatccttgctttctgcgtgagcagggtatcagctctgcagacacagtctgatctccaaggtggatcaagaacagctgaagacagatgaaagaggaattttacaaggtgactgtgcaggtgagccttgggcagaacagggtgcagccttggccagtgagggttagtacatttgggaatgtcactcagtgaaggaaaagaaatctgaggccatgacatgagcttccttcctgtttcaccatctattcaatcgttcatacgttcatttggtctccgagaaagaagttttaattcctctttaaatgtaatgtctccatgaatgctttttgccagataatactgtcttatttcccaacctccacaatcctttctaactaaaatacctcccatttctactgcttgttcctatcactggtgaatcactggttgtgtcttctttcttacatttctctacttagaagatattatttgaaaacaaatccatagggtctccctccctttttctttgatcccaaccttttctcccaataattataaaaattcctgtgctatttcagactgggaaactcaacttaaaccaaaagatacaattgctatgcagaacattcctgggggaaaaacatccaatggcataaacacggtaagacttactaggaagtattcctggtctttgtagtagaagtctgggaatctgaatgagttaaaacatcagcacccaaagcaggggtaagaattcaggcaccaggctttcaccagaaagctgtctcgggagagtttggagtttgattttcatgaaattggagaaatctgtaaacctaggttaacacttgctggctcacagagaataaccacaagtaaacatctatgtaaatatgattttagagttaagtatttagtacataattcattcattcttcactcagtattagaaaaactgtattaaagaagccctttgctgggaaggaatagagccttggacagaggagtgagcttattcaactcgaaaaagctaatagggcaaaagtcatacgcacctactgaaaatggtacacatgtcagtcatgatcatgtgcttcctatatatggcagaatcctcatggaagagaattcctgtgaataaggtgaaagtgaaaaagcctctagtcaccacttactcccttttcaacaggcagaaaatcaacctggtgagcactccctggagtgtaaccattgtgggaaattcagaaagaacactcgctttatttgtacaagatattgcaagggagagaaatgctataaatatataaagtatagcaaagtcttcaaccatccctcaactcttaggagtcatgtgagcattcacattggagagaaaactcttgaatttactgattgtagaaaagctttcaatcaagagtcatccctcaggaaacacttaagaactcccacaggacagaagtttcaggagtatgagcaatgtgatatgtccttcagcctacactcttcctgctcagtacgtgagcaaatacctactggagagaaaggtgatgaatgcagtgactatggcaaaatatctccccttagtgtccacacaaaaactggtagtgtggaggagggtttggaatgtaatgaacatgagaaaactttcactgaccctttgtcccttcagaactgtgtcagaactcactctggagagatgccctatgaatgcagtgactgtgggaaagccttcatttttcagtcttcccttaagaaacacatgagatctcatactggagagaagccttatgagtgtgatcactgtggaaaatcctttagccagagctctcatctgaatgtgcacaaaagaactcacactggagagaaaccctatgactgtaaggaatgtgggaaggctttcactgttccttcatcccttcagaaacatgtgagaacccacactggagagaaaccctatgaatgcagtgactgtggaaaagccttcatcgatcagtcatcccttaagaaacacacacgctctcacactggagagaagccttatgagtgtaaccagtgtggaaagtccttcagcacaggctcttaccttattgtgcacaagagaactcacactggtgagaaaacctatgagtgtaaagaatgtgggaaggcctttaggaattcctcttgcctgagggtacacgtgagaactcacactggagagaagccttataaatgtattcagtgtgaaaaagcctttagcacaagcactaaccttataatgcacaagcgaatccacaatggccagaaactccatgaatgaaatgactcagggaagtgtttgttgcccctcatgcctcctttctcactttagaacatatattggagagaagccctgttatggtcacctggaaacagccttctggcccaactctggatgcctgttatactgggacaaaccttataaatgttatagctatgattgtttttatcagtgagtatttcattcttatatgtgtcacaactgtagatcctatgaatattttagttatcttttcagtttaattgcattgtgaacagaacacatggtcttcaatatgtagattctgtgtgacatagatttgaacataattgctggacactgactgatgtactgtggcagacagaactagttgctgtctcaatatccattcctcccttctttcttaaagtaataaaatttaccatttagttcaagctggcaatgtggacagttttcacccagcttcccttacagctgtgagcggccaaatatgttcacatccctagcccatgcaaagtaggcagaagtcactggatacagctgctaaggaagctcatggaaatgggaatatctcatctggtgtttttttcttaactatttgccctttgtcttgtcccttatttcctagaaaatatatacaccaagaggaggacagagaaaggatactaaatgaaacaacaggggagatacaatattatctggttgcactaatcctgtgctgcttatctctggatttcatgttacatgagaaaaattaactgccatgtggtttaaaccactcttgtgggaagttcctctttcagctgatttcagtcccaactgttacatctaataaatggtcaagttttaggaatcgttcaagtatggttgaaaaattgtgttttctgaggcagaaggatcacttaagtctaggagcttgaaatcagctgaggcaacacagtgagaccccatctctaccaaaaaaggaataattaggtcttgctgtgttgcccaggctggagtgcagtggtgtgatctcagctcagtgcaacctccgccttctgagttcaagtgattctcgtgtctcatcctcccaagtagctgggattacaggcaaatgccaccacgcctagctacttttttgtatttttagtagaggtggggtttcgccatgttggccaggctggttttgaactcctgatctcaagtgatctgcctgtgttggcctcccagagtgctaggattacaagtgtgagtcaccgcccccagccaaattgttttctttaaaaatctctctctctaggccaggtgcagtggtgcatgtctgggagcccaaggcgggcagatcacttgagcttaccagttcaagaccaagcccagccaatgagccgaaactccatctctacaaaaaacaaaacaaaaaaaagttagccaggtatggtattgtgtacctgtaagtcccagctactcagtaggctgaggtgagaggatcacctgagcccaggaggcagaggtagcagtgagccgaggtcatgccactgcattcctgcccgggccacagcaagaccgtgtctcagggaaaaaaaaaaaaaaaaaactctccttttttggggggcactgtaattgggtacatttaagtttactcattttatgtttctggcaaattgtgctattagtgcccatacttttcccctaataactaatgttcattaatttactacaaatgtgagctactgacctagaaataccattttctcaacctgtaaggacaaccaggagcaacttactttttctcagcgttacatcagttatactgttgcttgcaataacatccagcaggtatggtcatctttacatcccacaacttgtcctctctattgatgcctttatgagttctttcgtaagacagacgtgaatgtttgttggggaatacacccaaacattcaggctaaccacctgaagtttctaggggttcagttgtctggcgcttgtcaagatattccctctaaggtgaaaggagaattgctgcaatttgtactactaatcacaaacagcacaatgcttggtcggtttttttggtttctggaggcaccatattgacgcaatatgacaacacttggagaatttagaaaaataacacgttctcggccagacgcggtggctcacgcctgtaattccagcactttgggaggccaaggcgggcggatcacctgaggttgggagttcgagaccagcctggccaacatggagaaaccccatctctaccaaaaatacaaaattagctgggcatggtggtacatgcctgtaaccccacctacttgggaggctgaggcaggagaatcgcttgaacccgggaggcagaggttgcagtgagccgagattggaccgttgcactccagcctgggcaacaagagcgaaactccatttcaaaaaaacaaaaaacaaaaacattctggcagtatatgagggcaggataacaaactcagacaaggacagaatgaagcctgaaaaccttcaaaaataatttatgaaatagaaggaaactgggttttttttttttttcgtttttttttttgagatgcagtctcgctctgttgccaggctggagtgcagtggcgcaatctcagctcattgcaaaccttcgcctcctgggttcaagtgattctcctgcctcagcctccggagtagctgggactacaggcaagggccaccacacccagctagttagagatggggtttcaccatgttgtccaggatggtctggatctcttgacctcgtgatctgcccacctcagcctcccagagtgctgggattacaggtgtgagccaccatgcctggccggaactgggtattttttaaaaagaaaccatcatatcgcatttaaatttatccagaaatgcaaagttggttttacattagaaaaatcaataaatacaattcacttttaaaataggcttattactcattcactcatactaataattactaggcacctagaatgaatgaggcagtgttcaaagcatttaatgcattattgaaaaaataggataatctcagtagataaagaaaaagccataaagaggtattactgagaaaaatctttgaaaatatgataaacattgtataaaaaaatgcaaaagtaaacaataaatgaatggtggaaaatagaaaatgagtttaaaatcaggaagatgacaatggtatccactacttagtattttactggaatcttaagtgaggcaggctaggaaaagatatttaaaaacctaaggaccagaaaggtagaagtaaatctgtcattatttataatatgattacctaaatggaaaatttcaaaggatctatatttaaattaatgaaaatgtttactatcttaataaagataaacttgcaacttatactcaggaatagaaataataaaatttaaaagtcaataccatttataagagcaacaatggtataacatatggaagaataaattttaaacttaccaaaattgtggaagaataaattttaaacttaccaaattgttttgaagacagtattgaaaacattaaagatgacgtaaacaaatttgagacattcattgaaaggtcaaattctgaaaagactcacttctcccaaactgatttagattcaaaaagttccaaatacagctccacttccagattggctgcagacatttacaggaacccacatgaataaacagtgaactaacatcttcaaagaccctggaaatctgtggacaaaaaaaggagtgaaagaattaaatgccagaggatgagctcctcctagaagagcagaaatcagtggctggtttcttccctgaaggcattttcctggtctaggagcagattggcggagagccaggcctgccacaggcagaggaactttactggaatatggagagaccagggggcattaatggtcacaaggctagtgtgacactataatataaaatagactctctttaccagtgctgcgtatccctataatgatttgctgagtgtgtagcaacagctggtgctgggcactaaccaggaaaaaatggatatccctattgtagtgcttagattccacagtcctgttagagggagtggtctgaaatagtcataggaaagatcttactcaagatgtttgaaacccgaagtgaaccaaaactaatttttacatcccaacctctgattggatcaaagttgaggagattctcacctaaactgcttggcagaggaaatggagtgacttccagatgaaaatatttttcaatttctgctgttcttttaagcataatatccacatccaacttaaaacatcacatgatgtgcagagcagcaggtcaatgttaccaatcatcaggagaaaaaggtccaacaaaaatagacccatagatgatatgagaagttggaattagcagacaaggactttagaattgttatagaaccaacaggttcatatgtctgctgtgtagtagcagaccaattacacagacacggattaagcagagagtttaattaccacagggcgccaagtaaggagataggaggagacatctatatccccaagaagttccaggctggagttttaaaggggatcagggagggtgaaggactggagaattagggttgttgatggtcagagcaagcaggataaagtcatcaggatgtggaaactagattctttggtaagtcagctcgtggtgcccctcagaccagctgagtcaatggggtccttcagaccacctgaaatggtaggtatatcagcatgtaaaaagtgtgaaagagtatctcaaaggaaaaacttaatgttttataatggtcaagttatcaatagagtagttaatcttgtaacagggtgatatggtttgcctgtgttcctacccaaatctcaccttgaattgtaagaatccccacctgtcatgggaaggacccagtgggaggtaactgaatcacgggggtgggtttttctgtgctgttctcatggtagtgaataagtctcacgaacgtatgattttataaaagggcagttcccctgcacacgctgtcttgcttgtcaccatgtaagatatccctttgctcttcgtcttgggccatgattgtgaggcctctccagccatgagggtctgtgagttcattaaacctctttcctttattagttacctagtctcaggtagtatgtccttattagcagcatgagaacagactaatacacagggtctacatgattctaggacaataggcaccagtgaactatgaagaagtaggtcagagattaaacttcattaatgttgaatgtgctataagcttggtttttcatttatccctctctcttctttcctgattaattttataaagtttataggggcagtttcagaattgcccctataacttatgacagatacgttaaaacaaaaaatttcaaatggatgaaaatatatatagaattgcaggccaggcgtggtggctcatacctgtaatcccagcactttgggaggccaaggtgggtggatcacgaagtcaggagttcgagaccagcctggacaacatggtgaaaccccatctctactaaaagaaagatcagccaggtgtggtggcacatgcctgtaatcccagctactcgggaggctgaggtaggagaatcacttcaacttgggaagcagaggttgcagtgagccaagattgcgccattgcactccagggttgggtggcagagcaagactgtttcaaaaaaaaaaaaaaaagaaagtacataaaattgcagtatctaagtggaatctctaaagtagaaacagacaatctagaggtaaaaattataatttctgaaattaaaaaaaaattctgtaagtgggcctaaaagcaaactaaacacagcaaataaaggtgggggagagggcaatcagtgaactcaaagataggttaacagaaatgtgcctaacttacggacacgggaaaacaatgagtgttttctaaaactgattaaaaacatcaaaccagcagagtcaagctcagcaaacctaagcaggataaatgcaaagaaaaccacacacagttcaccatcaatctgttaaaaaaaaaaaaatcttaagaaagagaaagtacgttcaggattttaaaaaatgtggctgacttctcagtgacataacagggagaagaaaaatgtaattgtatctttaaagtgctgaaagagaaaaacctaattgtatgctttgcaaaaaaaatcttcaaaaatacaaaattccattttgagacaaaagctgacaaaataaattgtcaaacttgtgctatgggaaatactacaggaagtgtttcatactgaagagaaataatcccaggctgaggtgcatgcagattgatgggatgaaattaaagagtatggaagggcaaacaggtggacaaatataaaatactatttttttaatttaaagactattgattgattaaagcaacaataacttagtgtgaactctgtaataagttccagggtctgtatgtctgcttttacaccagtaccatgctgttttgcttactgcagccttgtagtatagtttgaagtcagatagagtgatgcctccagctttgttcttttttattacccccagacagggtttcattctgccacccaggctggagtgcagtggcacgattgtggctcccttcagcttcaacctcccaggttcaagcaatcctcccgcctcagcctgccgaatagctgggactacagacacatgccaccacacatggcaaagttttgtattttttgtaaagatggggtctcactgagttgcacaggctggtctcaaactcctggactgaagtgatctcacctagggctccagtgatcctgtcttgggcttccaaagcactgagattattaagtgtgaggcactgcacctggatctcctcatctttttctaaagccacaagtcctgcagggtacaggagctcatgcctgtaataccagcactttgggaggccaaagtaggaatactccttgaggcctcaaaggtttgagagcagtttgggaaacaaagcaagactgtctctacaaaaaaatgtttttaaaaataagctgggcgtggtggtgtgcacttgtagtcctagctacttcggaggctgaggtgagaggactgcttgaggccaggaggttgaggctacagtgagccatgattgtgccactgcactccagcctgggtgaccaagcacaagaccctgactcttttataacaaaacaaaacaaaaaaagccaccagtcccactcacataacctattaatctattaacccattaatccctcaatctattaatgaattaatccattcaagagggcagagccctcaagaccagtcgtctcttaaaggccccacttctgaatactgccacatgggagattaaatttcaacatgagtttttggaggggacaaatattcaaactatagcattccgccccggccctcaaaaactcttgctcctctcacatatgagtacattcattccttctctatagcctaaatgtctcaagttattccatcaccaactcaaaagttcaaagtccagagtatcatctgtgagcctgtgaaatcaaaacaagttacctactctcgagagacagtagtggtacaggcataagacagacattcacattccaaaaggggagaatgaggaaaaagaagtaacaggccccaatcaagtctgaagcccagcagggcagaccataaatctgcaagctggagaatcatctcttttgactccacgtgctgcctcctggaaaaactgaggtcacagtttgaccccccaaggcctcaggcagcccagcccctctggttttgctgggtgcatcccaaatagtggcttatacagtttgaggacttgtgcctgaagacttcctaggtgggcgttgcatgctgctggttactctgcagttttggggtcctgatggcattcttactcccatagctccactaggtattgccctggtggggattctgtagcagccccaacgtcacatttctgcatgtgaccatggctctggtcgggactctctgcagttgctctatccttacaacacgtctatgcttgggcctccaggcttttgatgacatcctttggaatctgggtggaagctgccaaacctccattctgcaagtctgcagaattagctgcacatggatgccaccaaagtttatgacctgtaccttctgaagggcatgagctgcacctgggtcacttaagctatagctgggcagccacagagcactgtgcagaggtgcagggagcagagttccaaggcaactcagcagcaaactatggagaatgactggtctgtcccctgaagccactgtgccctcgtaggcctctaggcctgtaatgtgaggggcaaccttgaaaatctccagaatgccttcagggtctttcttccattgttttgagtaaaagcacccggctcccttctgtgctaatctcttcagcaaaggatcactagggtacgaccttagtttccccacctgaacacactttttcactctatgtggccaggctaagagtttcccagatttttccatggtgcttcccttttaacataaattctgtcttttaagttgttcttttgcttctgaatcttggcacaaatagccaaaagtaaccatgcaactcctatgtgttgcttagaaatttctactgccacataccctagttcatcactctcaaattaggccttccacaaagccctcaggcatggatcgagttcagccaagttttttgccagtttataacaaggacagcctttactgcagtttccaatgccttctttctcaattccagctgaaaccacatcagaatggcctttactgtccatatttctatcaaaattctagacacagccacttaacaaatctctaaggcgttccaaatctttacctagctttgttttctaagccttcatcagaatctaggctttttctagtctgctcctccaaattattctaccttctgccccattatacccagtttcaaagctgcttccacatgttcaggtatttctcgttgtcagtaacaccctacttcttggtaccaattttccagaattccatgaactctaccaccagttaacccaatggtaactggaacatattccagctaagaaattcagcagtttattaaaaattaatggatctaggccaggcatggtggctcacacctgtaatcccaacacattgggaggctgagatgaggggatcacttcaacccaggagtttgagaccagcctgggcaacaaagcaaagccttatctctacaaaaaatgaaaagatttgctgggcatggtggtacatgccctgtggccccagctactcaggaggctgaggttaaagtattgcttgaacccagaagtcaaggctgcagtgaggtatgatggtgtccctccactacagcctgggtaacagaatgaaaccatgtctcaaaaaaaaacctcagccaggcgcagtggcttatgcctgtaatcccagcactttgggaggccaaggcaggtggatcacctgaggccaggaattcaagaccagcctagccaacatggcaaaacaccgtctctactaaaaaaaaaaaaaaaaaatacaaaaattagccgggcacagtggcacacacctgtaaccccagctactcaggaggctgaggcaggagaaccacttgaacccaggaggtggaggttacggtgagccaagatcgtgccactgcactccagcctgggtgacagatcaagactctgcctcaaaaaaaaaaaaaaaaaaaaaaattgggtctagacactgagcaccaatgactactaacactcacaaaagagacaccattggacattatgtaccttctgatcaaagatcacatgtgccaccacctccccaaaaatgaaactgaatcttatctctagatccaactatgatataaaaagaaatacgctgacaaccctatgagaatgcaattagcaaaatccacactacacataactctagatcttaatccaggtgcttcaaaaaataaaacggggaagactaaaaaatgacatccaaaaatgagcaaaaattaaataatgtttggggttccacatttgggtgaaaggtaataaatgattactataaaagtcatgagagtggttactctgagggaagaaagaggcagttgtgactgggacatggtatttgaggcaaagttctacatcttgaacggggtcgtggttacaagagtatttgttatttaattcatgaaccacacatttaggtcatgtgaaaaaataaacctaaacctgatctccccttaccaaaaaatactaggaaatacaagaggaaatcttcccccaactacccttatgaggctggcataaccatgctatgtaccagataatatggcagaaaaagaaaaccacaaagctatctcacaaacagattggtcaggtacagtgcctcacacccataatcccagcactttgggaggccgaggcaggaggatgactggagcccaggggttcaagactggcctaggcaacatagggagaccctgtctctacaaaaatttaaacattggccagcatggtggtgtgtgcctgtagtcccagttattcgagaggctgaggtgggaggatggcttgagcccaggagttcaaggctatactgagcctgatcatgccgctgcactccagcctgaatgagagtaagactctcttaaaaaaaaaaaaaagtgtatgaaaagtcaggaactatagtttctataaatatatgttaattactttttctggcagggcgcagtggctcacgtctgtaatcccaacattttgggaggctgaggcaggcggatcacttgaggtcaagagttcgaggcctgcctggccaacatgatgaaatcccgtctctactaaaaatacaaaaattagctgggcatggtggtatgcacctgtagtcccagctactcaggatgctgaggcatgagaatcgcttgaacccaggaggcggaggttgaagtgagccaagttgcactactgcactccagtctgggaaacagactctgtctaaaaagtaaatatatatatacatacacacacgcatacattttcaaagtatatgttcaatttggttttttttcaaccatgacctatctttataggtgaagcacctccaaattagcatcagggggtccaactgttaatctaaaaaaagtataatgaatacactactaccctgaagtttcagactttttggccattatacattatgttaacaattagatccattgctttaaatttagttatttcatctgaaaagttttccggaggccaggcatgctggctcacacctgcagtcccagcactttaaaaggccaaggcaagaggattgcttgagcccaggagttcgagaccagcctcagtaacgtagtaatactccatttgtatataaaaaaaaacttttttaagaagaaaagttttctggagattgaaatgtatccaatttaatatcctctttgctctcaggtattttaccagtgtttctacaatgaatgtggaaaggtttcacaacaaaaccaatctttggcctttcctccttccccctttctcttccttttcagcagagtgtccttttggaaggtacccctgaggtgtgggggactgcaggggccagcatgtccacagccaagcttttgggtaacacagatgcaaatgagggtttaaaagccaatgaggataatggaagctagccttctcactgagaaaagagttacaaacaggaaaggggaaggtgagaataatacctgtcctgattaattgaaaatattagtgtaaagtcctgttaacatataatataggactcaaatgtgtatacttatatccacaaatgtgtttaggtagaaaaacacttattctctactcctgtttgctgagaggccctgaaagcaatgaatccaaggtagcaatgataatacttagtgcccagaattggtttctaaataccattatcctcttaaaggaactagagctctttggagaaaaggctgactccagggctggagaaggaaaaatatgagatgagcctagaacatcttaagactggaaagttctcatggaatgacgggtcatgtcaaggggatacaggaggcagccaaggggccttccactggccaaagctgggacaactagagcaaaataagtaatgagtatatgggaacccatgaattcacactgctacaaataaatgaagaaagaaatagggaggaaaaaaatctctaacctagagcagtacgacaaacgggaaatctggaaggcacagacagttggaaagaaaaaaaaattgccgggtgtggtggctcacgtctgtaatcctaacacttcaggaggctgaggtgggcaggtcacctgaggtcgggagttggagaccagcctgaccaacatggagaaaccccatctctactaaaaaaattaaaaattagccaggcataatggctcatgcctgtaatcccagctgaggcagaagaatcgcttgaacccaggagccggggaggttgcagtgagccgagatcatgccattgcactccagcctgggcaacaagagcgaaactctgtctcaaaaaaaaaaaaaaaaaaaaaaattggcaactattataataataattaatccagacaagaatcattactggtggatgagtttctaagaggaaaaagatatttacatagtcttaacacattgccccctaaaagcatttaagtataacctacttttaattaatgcagttttgcaacttttcagtctaaagaaaaacaaaaaattaaattaaaaaaattaatgcacagtggagaaacttgccagacactatcttaaccaagagataacagcttacaccactattagaaataatggggagtggccaggcgctgtggctcacacctgtactcctagcactttgggaggctgaggagggaggattacttgaggtcaggagttcgagaccagcctggccaacatggtgaaaccctgtctctacaaaaatacaaaaattagccgggtgtggtggtgtgtgcctgtaatcccagctgctcaggaggctgaggcaagagaatcgcttgaacccaggaagcggaggttgcagtgagccgagatcacgcaccactgcactccagcctgggtgacagagcaagactctgtctaaaaacaaaaagaaaagaaataatggggagtctttggtggtttgtgttgtgggtctttatgatcagtgatgaggtctattcatctctactgtgagaccacaggggtcagtggggttagtgagtgatatggtttggctgtgtccccacccaaatctcaccttgaatggtaataatccccacatgtcaagggtggggccaggtggagataactgaattacaggcagtttcccccatactgttcttgcggtagtgagtaagtcaagatatgatggacttataaagggaagtccccctccacaagatctcttgcctactgccaggacattgctcctcagtcgccttctgccatgattgtaaggcctcctcagccatgtggaactgtgagtcaattaaacctctttcctttgtatattacccagtctcaggtatgtctttattagcagcatgaaaacacatcaatacagtgaggatttgtgaggttagtgatgaaggtctgtagggacagtgattaggagtctctggggtcagtaacatgtacactgtggggttagtgatagagattccttaggagcagtaatagggattatacagagatcaatggaggaatctctggtgctatgttgcagctctgtggggtcggtgatatatatgaagcggggtcagggatgtgcagtctgaaatcaatggtgtggctatgtgggggtcagcgatgtgatcccaagggggcttggtggagattcagatggtcagtcatactggggaactgtggagtcattgatggaaggtccgtgggattgctcattgggaatttagaggtaagtactgtggcgcccatagaatatttaccagggatggaaagtgcattagttaaggtcagtgatgggggttgaggattggtgatggggtgtaggtgtgtaatatgccagtggtcaataggttagatgacgagggctataaggaatgctattcattgtctataagaaacccactttaattaaacagacacatatagattaaaagatgaatgaagaaagatataccatgctaatgacaatcaaaagaaagcaggagtagctatattaatttcagacagagcagacttcaacttttttaaattacagatgtggggtcttgctacattgcccaggctggtgtcaaactcctagcctcaagcgatcctccacctcagcatcccaaagttctgcattacagatgtgagaccctgtgcctggaccagagcacacgtcatatcaaggaaagttatctgggataaagaggggcataacttaaagagaccaatattccaagaagtcataacaatccttaatgtgtgtacacatgacagagcatcaaaatgaggtaaaagctagtagaactgcatggagaaatagataaaaccactattatagctggagatttaaatacccctttatcgccaggcacagtggcacactttgggaggccgaggcggttagatcacgaggtcaggagtttgacaccagcctggtcaatatggtgaaacctcgtctctactaaatatgtaaaaattagccaagtgtggtggtgcacacctatagtcccagctacttgggaggccgaggcaggagaatcgcttgaacccaggaggcaaagggtgcagtgaactgagatcacgccatggcactccagcccaggtgacagtgcaagactccatctcaaaaaaaaaaaaaaaaatgaaaaaataaattaattaaaaataaatacccctctatcacaaatggacagatccagcagggagaaaatcagtaagaatgtagtaaaactcaacagcattatcaatcaactggatataattaacatatatagattacttcatccaaaaccagcagattatacattcttctcaagctcacatagaatattcatcaagacaggccacactgcgggtcatgaaacacctcttaacaaatatgaaagaactgaaatcatacaatgtatgctctcagatcacaacagaattaaactggaaactaatcaaagacagctaaaaaaatctcaaaatacttgaagatcaaacagcacacttctaaataaataggtcaaacaagaaatctcaaaaaaagtttaaaaaatttgcactgacaacagatacaacttaacaagatttgtggggtgcaacaaaagcagttcttcgggggaaatttataacactgaatggttagaaaagaaaaaagatctgtgccaatcatctaagcttccaccttaggaaactaaaaaaaaaaaaaaaaagcaaattaaatccaaagtaagcagaagaaaagaaataataaaaattcaaggccagacatggtggcttatgcctgtaatctcagcacttttggaggccagtgtgggaggatcacttgagggccaggagttttgagaccagcctgggcaacacagctagactccatttctacaaaaattttaaaagccaggcatggtggcacatgcctgtactcccctctatttgggtgactgaggtggaagcatcccttgagtccaggagtttgaggctgcagtgagccatgatcatgccactgcactcctgcctggacaacaaagcaagacactgtctcaaacaaaaaacctcaagcaaaagtcagtgaaattgaaaacagaaaatagagtaaaatcaacaataccaaaagctggttctttgaaaggatgaataaaataaacctctcatcaggctaacaaagaaacaacagagaagacacaaattactaatagcagaaattaagaagggacatcactacagatctcataaatatgaaatggggggcggagccaagatgtccaaataggaacagctccagtctacagctcccagcatgagtgatgcagaagacgggtgatttctgcatttccaacttaggtaccgggttcatctcactggggagtgtcagaaagtgggtgcagcgcaccgagcgtgagctgaagcagggcgaggcatcacctcacctgggaagcgcaaggggtcagggaattccctttcctagtcaaagaaaggggtgagagacagcacctggaaaatcgggtcactcccaccctaatactgcacttttcaaatggtcttagcaaacggcacaccaggagattacatcccacgcctggctcggagggtcctacgcccatagagccttgctcattgctagcacaacagtctgagatcaaacggcaaagtggcagtgaggctgggggaggggcgcccgccattgctgaggcttgagcaggtaaacaaagtggctggaaagcttgaactgggtggagcccaccgcagctcaaggatgcatgcctgcctctgtagactccacctctgcgggcagggcacagccaaacaaaaggcagcagaatcctctgcagacttaaatgtccctgtctgcagctttgaagagagcagtggttctctcagcatgcagctggagatctgagaatgaacagactgcctcctcaagtgggtccctgacccctgagtagcctaactgggaggcatcccccagtagggggagactgacacctcacatggctgggtactcctctgagacaaaacttccagaggaacatttgctgttcaccaatatccactgttctgcagcctttgctgctgatacccaggcaaacaggtttggagtggacctccagcaaactccaacagacctgcagctgagggtcctgactgttagaaggaaaactaacaaacaggacatccacaccaaaaccctatcagtacatcaccatcatcaaagaccaaaggtagataaaaccacaaagatggggaaaaaacagagcagaaaaactggaaactctaaaaatcagagcgcctctgctcctccaaaggaacgcagctccgcatcagcaatggaacaaagctggacggaaaatgactttgacgagttgacagaagaaggcttcagatgatcaaactactccaagctaaaggaggaagtttgaacccatggcaaagaagttaaaaaccgtgaaaaaaaattagaatggctaactagaatagccaatgcagagaagtccttaaaggacctgatggagctgaaaaccaaggcacaacaactacatgacaaatgcacaagcctcagtagccgattcgatcaactggaagaaagggtatcagtgatggaagatcaaatgaatgaaatgaaacaagaagagaagtttagagaaaaaagaatgaaaagaaacaaagcctccaagaaatataggactatatgaaaagaccaaatctacatctgattggtgtacctgaaagtgacagggagaatggaaccaagttggaaaacactctgcaggatattatccaggagaacttccccaatctagcaaggcaggccaacattcaaattcaggaaatacagagaaagccacaaagatactcctcaagaagagcaactccaagacacataattgtcagattcaccaaagttgaaatgaaggaaaaaatgttaagggcacccagagagaaaggtcgggctacccacaaagggaagcccatcagactaacagctgatctctcagcagaaactctacaagccagaagacagtgggggccaatattcaacactcttaaagaaaagaattttcaaccagaatttcatatccagccaaactaagcttcataagtgaaggagaaataaaatacagacaagcaaatgctgagagattttgtcaccacctggcctgccctacaagagctcctgaaggaaggactaaacatggaaaggaacaaccggtaccagccactgcaaaaacatgccaaattgtaaagaccatcaagactaggaagaaactgcatcaactaatgagcaaaataaccaactaacataatgacaggatcaaattcacacataacaatattaaccttaaatgtaaatgggctaaatgctccaattaaaagacacagactggcaaattggataaagagtcaagacccatcagtgtgctgtattcaggaaacccatctcacgtgcagagtcacacatagactcaaaataaagggatggaggaagatctgccaagcaaatggaaaacaaaaaaaggcaggggttgcaatcctagtctctgataaaacagactttaaaccaacaaagatcaaaagagacaaagaaggccattacataatggtaaagggatcaattcaacaagaagagctaactatcctaaatatatatgcacccaatacaggagcacccagattcataaagcaagtccttggacacctagaaagagacttagactcccacacaataataatgggagactttaacaccccactgtcaacattagacagatcaacaagacagaaagttaacaaggatatccaggagttgaactcagctctgtaccaagtggacctaatagacatctacagaactcttcaccccaaatcaacagaatatacattcttctcagcaccacaccacacttattccaaaattgaccacatagttggaagtaaggcactcctcagcaaatgtaaaagaacagaaattataacaaactgtctctcagaccacagtgcaatcaaactagaactcacgattaagaaactcactcaaaaccgctcaactacatggaaactgaacaacctgctcctgaatgactactgggtacataacgaaatgaaggcagaaataaaaatgttttttgaaaccaatgagaacaaagacacaacataccagaatctgggacacattcaaagcagtgtatagagggaaatttatagcactaaatgaccacaagagaaagcaggaaagatctaaaattgacaccctaacatcacaattaaaacaaatagaaaagcaagagcaaacacattcaaaagctagcagaaggcaagaaataactaagatcagagcagaactgaaggaaatagagacacaaaaaacccttcaaaaaatcaatgaatacaggagctggttttttgaaaagatcaacaaaattgatagaccactagcaagactaataaagaagaaaagagagaagaatcaaatagatgcaataaaaaatgataaaggggatatcaccactgataccacagaaatacaaacaaccatcagagaataaacacctctacgcaaataaactagaaaacctagaagaaatggataaattccttgacacatacaccctcccaagactaaaccaggaagaagttgaatccctgaatagaccaataacacgctctgaaattgaggcaataactaatagcttaccaaccaaaaaagtccaggaccagatggattcacagccgaattctaccagaggtacaaggaggagctggtaccattccttctgaaactattccaatcaatagaaaaagagggaatcctccctaactcattttataaggccagcatcatcctgataccaaagcctggcagagacacaataaaaaaaagagaattttggaccaatatccctgatgaacatcaatgcaaaaatcctcaataaaatactggcaaaccgaatccagcagcacatcaaaaagcttatccaccatgatcaagtgggcttcatccctgggatgcaaggctggttcaacatacgcaaatcaataaacgtaatccagcatataaacagaaccaacgacaaaaaccatatgattatctcaatagatgcagaaaaggcctttgacaaaattcaacaacccttcatgctaaaaactctcaataaattaggtattgatgagagtatctcaaaataataagagctatctatgacaaacccacagccaatatcatactgaatgggcaaaaactggaagcattccctttgaaaactggcacaaaacagggatgccctctctcaccactcctattcaatatagtgttggaagttctggccagggcaatcaggcaggagaaggaaataaagggtattcagttagtaaaagaggaagtcaaattgtccctgtttgcagatgacatgattgtttatctagaaaaccccatcgtctcagcccaaaatctccttaagctgataggcaacttcagcaaagtctcaggatacaaaatcatgtgcaaaaatcacaagcattcttatacaccaataacagacaaacagagagccaaatcatgagtgaactcccattaacaattgcttcaaagacaataaaatacctaagaatccaacttacaagggacatgaaggacctcttcaaggagaactacaaaccactgctcaatgaaataaaagaggatacaaccaaatggaagaacattccatgctcatgggtaggaagaatcaatatcgggaaaatggccatactgcccaaggtaatttatagactcaatgccatccccatcaagctaccaatgactttcttcacagaattggaaaaaactactttaaagttcatatggaaccaaaaaagagcccacattgccaagtcaatcctaagccaaaagaacaaagctggaggcatcatgctacctgacttcaaactatactacaaggctacagtaaccaaaacagcatggtactggtaccaaaacacagatatagaccaatggaacagaacagagccctcagaaattatgccacatatctacaaccatttgatctttgacaaacctgacaaaaacaagcaatggggaaaggattccctatttaataaatggtgctgggaaaactggctagccatatgtagaaagctgaaactggatctcttaaagacttaaatcttagacctaaaaccataaaaaccctagaagaaaacctaggcattaccattcaggacataggcatgggcaaggacttcatgtctaaaacaccaaaagcaatggcaacaaaagccaaaattgacaaatgggatctaattaaactaaagagcttctgcacagccaaagaaactaccatcagagtgaacaggcaacctacagaatgggagaaaatgtttgcaacctactcatctgacaaagggctaatatccagaatctacaatgaactcaaacaaatttacaagaaaaaaaccaccccatcaaaaagtgagcgaaggacatgaatagacacttctcaaaagaagacatttatgcagccaaaagacacatgaaaaaatgctcatcatcattggccatcagagaaatgcaaatcaaaaccacagtgagataccatctcacaccagttagaatggcaatcattaaaaagtcaggaaacaacaggtgctggagaggatgtggagaaataggaacgcttttacactgttggtggaactgtaaactagttcaaccattgtggaagtcagtgtggtgattcctcagggatctagaacaagaaataccatttgacccagcaatcccattactgggtatatacccagaggattataaatcatgctgctataaagacacatgcacatgtacgtttattgcagcactattcacaatagcaaagacttggaaccaacccaaacgtccatcaatgatagactggattaagaaaatatggcacatatataccatggaatactatgcagccataaaaaatgatgagttcatgtcctttgttgggacatggatgaagctggaaaccatcattctcagcaaactatcccaaggacaaaaaaccaaacaccacatgttctcactcataggtgggaattgaacagtgataacacatggacacaggaaggggaacatcacacaccggggcctgttgtggggtggggtgagggggaggaatagcattaggagatatacctaatgttaaatgacgagttaatgggtgcagcataccaacatggcacatgtatacatatgtaactaacatgcacgttgtgcacatctaccctaaaacttaaagtataataaaaaataaaaataacaaatacgaaatggataataaagcaatttcatgaacaattctacatccacaaatttgaaagcctagatgaaatacatcagtgatgtgaaagaaacaatatgcctgtattagtctgttttcatgctgcttataaagacatacccgaaagtgggcaattcacaaaagaaaaaggtttaattggactcacagttccacgtggctggggcggcctcacaatcatggtggaagccagggaggagcaagtcacatcttacgtggatgttggcaggcaaagagagagcttgtgcagaaaaattcccgtttttaagacagtcaaaactagtgagacttattgactatcacaataacaggatggggaagacttgccccatgattcaattacctcccaccgggtgcctcccacaacatgtgggaattcaagatgagatttgggtggggacacagccaaaccatatcactgccaaaactcacacaagaagaaacagacaatctaaatagatctgtatctataaagaaaaagaataataacattccaaaacaaaaagcaccaagtccagatgtgttcactagtgaattctaccaaacatttaaggaagaaagtaagaaagtatgccagttttctacaatctcttccagaaaaagcagagggaatactttctaacattctgtgaggccagcatcaccctaataccaaaacgaaagacattaaaacaacagagaactacaggccaacaccatggctcacaaatacagatgcaaaaagtttcaacaaggtcgagcatggtggttcatgtctgtactcccagcactttgagaagccaaggtgggtgggtcacttgagtccaggagttcgagaccagcctgagcaacatggcaaaaccccatctctttaaaaaaaaaaaaccaaacaaacaacaacaacaacaaaaaccaatcctgtattagtgagggttttccagagaaataggattaataggatttatataggtatataccacaccttttttctccacttcttttccccacaacacaacaagcggatgacaatatttgtgagtcataacaagttaaatgaaacaacatggttaacttaacaaacttctctataaacttttcttgattctctaaaaactgtccaattttttccttgcataaagccaaattagacacagaaaatggcacatgttcccttacttccactagctaccacccacaatgcacacaggtttcactttaggggccgatatggggccccactcctggtgatactggttgggcttactctcttgggaagtgggagggataggggctagtttgcataagggggaggcgtgagtgatgaccttggggtgggttccttcattgaaaaactggtaggaagcccctcagaattgggggactgaagagaccctggggaaaacgtaagccttctaaagggagcagctaggaggggatcccttaggcatggcattctggtccctggaattaacatgagcctgtaaagagccataaaagcctgtacataagggacgtcttcccattttcctttttacaaaataagtctaattgtaaatatcattataatgtatagaaccatatgtaggccaaatctgttagttttctaatctgtattgaacccaaacagtgctgcaacaaaaaatgagtctcttcttaagacgaatttgaacttgctccaatagcgtaaaagacactccagtgccaagtcctctgggatgcttgctgttgtccccaggtcgactaaggatcgctacagggggtttcagcctaagtttagcaaatgtctagttaattttcccttttaaattcccaccttccagaaaggtgtaaatataaatagcagggtgttataaaagtggattaggagctaaaaatggacagttggatgttgaacctaaattccagagggctgggcagagaggagctaaacaaatggtaactgtggaagggaggaaaggaagggggtaagcagcattgcccaaagggagacctcagaggccctgaccacctgagaacctactcaatagtggagacaccaaaaaaaaatattcatgtggcacagacctgttttagctagtcttcaatttggtggggtgtccaagcccactagactccagagtctagtcccgcctcctacctcaccgtcaacttacttttagcttataaaccttcgtatgtgcaaggcgcggtggctcgtgcttgtaatcccagcactttgggaggcccaggagggcagatcacgaggtcaggagttaagcctggccaacatggtgaaaccccgtctctactaaaaatacaaaaattagctgggtgtggtggtctgcgcctgtcatcccagctacttgggaggctgtggcaagagaatcacttgaacctgggaggtggaggttgcaatgagcggagatcgtgctgttgcactccagcctgggcaatagagtgagactgtctcaaaaaaaggaaatgacaagagattaattacttagtgaatctagggcaatggtggtttgttgtaccagactttgacattttcttcagtttgaaaatttccaaattaacaaggtaaggaaaatccacttggaaaaggctcttgctgtttatggtcaactcaattcccatttgtgatacaaaaacaagcctgcatgttctctttttttctctggagatgcttgtattttgaagcttagagatttacagggttctgagctgaataccgagctgattttccgtgacagtaaaatttgcatttacatgcattcattcacccatgcatttaattgtgtcagatgcccgtactccctaacaatgagtttctaatttctccacctgtacataatttaccaaatataaagaacatcccccaaaagaacaaattcacccagtgttcacccaaactggctggaatcccctggtcggtgaagctgctggggacaaaacaaccacgactccagcaagagattttcttccttctgcagaaagtctgcaaaggctgatgaagaggcttgggaaaggggagaccgcggacgaaaaggccccaccgaagctcgctgcccgcactcccgacccgccttttacctggacccaagcccccagcggcgcaggtgggagtctgggaagaagtgcggtgtcggcaggaagtcccagcgcgacgtccgggaaagccacaggaggaggcgacctgcaggaggctaccctttgaccccaaccctactctccagtcctcctagtctggtgggagcaaccttagactggttgatgtggaaggaggcgggcctgcacgcggagtacggcattcacttccgtttccgggagcgcacttccgtttccaggcatgagggcaacgggggaggggggggaggtgacctggaatgggctgagaaacaggagccacgagagccgcgtggtgacgttagaagggcgctacagccgcgactttccaaagctagtagagagatcccagcgtcccccgggaaaggcagaaggggcggggcgataccaagacggagacaatggggcggggcgatgccctggaggcgggattgcctgtgggagagccacccttcaggccatgcagaccccaggtgaaatctgcacaggggtctcctggagccgtgggaggggttccccttcttctccttcaagagcgtttttatgttgccctctttatggatggaaaacagaggcatggacgggcggtgtaacttggccacattcactaacctaatgaagaagtctctgaaactggatcctgggtcgctggaggccttacaccctcctccagggactatgataaatatcagtctacaagcaaagaaaaactttggaatttaaagccctgtgtactgtagttcttcctatatttttgacaaccaaaccagaacctttatatcacacacatacacacacacaaaccctttttggcattttctaaatatccgtgtgaataaaacacctgccaagacgtggtaggatttaaaagtgatttggggcgggtgttttattcacgtctgcaatcccagcactttgggagacccagatgggaggattgcttgagcccaggagttagagaccagcctgggcagacccctgtctcctaaaaacataaaaaagtgatagggaataaatgtagaattgccataggtcataatttgtttaatataaagctgctacgcttttaggtctgacaaacttcctctccctgtgcggttgtttcctgatataacccacgtgttcctcatctcacagctgctgactcctataaaagctaatgaccaacaccacagtcatgtaaataaattccccccttcatttttttccctagccaatcgacagtcacgtgaagaaagactgaaggacaaacccatggtccttaaaaggcacagtcccacaggccctctctgtctcttcatctctccagtaacctacccacaggttgagcaccatactgtctctggacttcctgtgggccattattcagcacccctaacttctctggaatctataataaactttttcctttcattgattttggtttcactttctcattgtgtctcacttgacacacttgaacttaacatcctccaccagctctcctagagagtggctatctcgggccggacatgttggctcaggcctgtaatcccagcactctgggaggccaaggtgagtggatcacctgaggtcaggagttcaagaccagtgtggccaacatggtgaaaccccgtctctacaaaaaatataaaaattagctgggcatggtgggagatgcctgtaatcccagctgctcgggaggctgaggcatgagaatcacttgaacccaggaggcagaggttgcagtgagctgagattgtgccactgcactccagcctggatgacagagcaagactcttaaaataaaaaaattaaaaaaaagagtgtggctatattggcttttggcctttctcaagagagaaacctcaagaccgagttggaaaataaacattaatactaaaaaatgataccaacgtatgatccagcaattccacttctgggtatattaatcaaaaagttgaaagcaggtactggaagagctatttgtacacccatgttcatggcagctttattcacaatattgaaaaggtgaaagcaaatcaaactgtggtatagccatacaatagattatccagccttaaaaaaggaaattctgagatgtgcagaatttgaacatgaacatgaacatgttccttgaacatgttccttgatcatgaacatgaacatgaaccttgaacatgttacgctaaatgaaataaactagtcacaaaaagtcaaatactgggacttcacttttatgaggtacctacagtagtggggttaacacagacacatgttggaacaactaagttcctcttcaaagactcaactttctgatcataagttataaaagttgtacatcaatcctaccccctttcttctcttctgtttccacaaatcgcacatttaccctatttggaaaagtttaagtcttagccaatcgggatcagcttagattgtgcagtccaatcccagccaattgggggacgacacagaaacaggaactgcattaaattaaaaactccttcccttctttgttcatcgtgctcttgcgatcgtaacgggcacaagcagcacccttctgcagaagtaaaggtgccctgcggagaaattttctagggggtttcttttggctatgtcgagcacttgtttccaacagagaattgaatggtgtttgccagagattgggaagggagcagtagggagttagtgtttactgggttcagtttgggaagataaacattttttagtgggatgatggtgacagttgcccaacaatgtgagtatacttaatgccagcgaagtggacacttaaaatggttaaaatgtaaactttatgtaatatactttaccacaattcttaaaaagtgaatagaggattattagttttatttaatgaagcctccaaaaaccagagatctggggcaaaagaaattcaaaagcagtttggctagcagtgcattttatacagtctctgctaaataaaatacccactgataagtaaagggtttggaattgtattgctaacattagatttatacattagaaacgtgtgtttaaaacagacattctctatcaactggcaaataaaagatttttaaaggattaggttttaaaataagtattaaattagatgctgcaccaaagaatatattggtttaaaaaattgctcagtgccgggtgcagtggctcatgcttgtaatcccagcactttgggaggccaagaggggcagatcatctgaggtcaggagttcaagaccagtctggccaacatggcaaaaccccatctctactaaaaatacaaaaattagctgggcgtggtggcacgtgcctgtaatcccagctactgaggcgtctgaggcaggagaatcacttgaacacgggaggcagaggttgcagtgagccaagatctctccactgcactccagcctgggcaacaagagcaaaattccatctcaagaaaaaaaaaaaaaaaaaaaaaaaaaaaagctcagctgctgtgtcagagaattaaacaatgagttaaaaacctaacactaaacagtatttttaaatgtcctcatcctgtcctcacccagattccaagcatcaaggagtcacgctcttgaggaaaggtgcgccttgtccaggagctccagaagccacctgtgcagaaatttcaccagtctccaagtcctgcagagcagtcacatggcactccagacccaccctgcaatccactgccccaaaagtcaccatggggtgaacacagctcaacattggtggaaggtgtgggtgccttaacgcattcattaaccaataactgtgggctttgctctagagacagaactaaagcccccaccctcttctactctgttagtggagcctgcggtttttatgggcacaggatgagggcggggcaggccatgagtggttttgaaaaaggcaacatttgaactggaaaagaaggatgtgaagttatcactttgggccaatctgaaaagttacgtactgcacaattccaactctatgacattctgaaaaaggcgaaactatggagacagtaaaaagatgagtggttgtcgggctggggagagggagggaggaatagtgggaggaccgatgatctgtggactttgggtgataatgaagtggcaatgcaggttcatgaattctaacaaatgtattactctggtggagtatgttgatgatggtggaagctatgcatatgtagtggccgcaggaatataggatgtctttgaaccttccacactattttgctgtgaacctaaaactgctctgaaacatggattttttgttttgagacagcgtctgactctgtcacccaggctagagtgcagtggcacaatctcagctcactgcaacctccttctgggctaaaatgattctcctgcctcagcctcctgggtagcagggactataggcataagccaccatgcccagctaagttttgtcttttttgtagaggcggggtttcaccaggttacccaggctggtcttgaactcctgagctcaagcaatccactcacctcagcctctcaaagtgctgagattacagctctgagccactgcaccaggtgaacacggatattttaaaagagtaataaaacattttcaattggtcagagttttccaatctgagaagtcaacattatttagctgaactaccactctccaaaacctcttacactaataggatttctctctactgcaaaaccttacttaagcaatccctgagataacagcaaagggctttccatgtttcacagactgtgtggtctcattgcaagttacttcctgctgggttgtgaagagattctgacagctttcccatatttcttacattcacatggctatgaactgtgatacagtaagatatgagaagcaaatgaagtacttcctgcatcctttttataatcacagggttttaccccagtgtgaattctcacaaagatattaaggcttgagcaatgaaataaggtgacaccatatccctgggatacacaggttcttcctccaatgtgagatttcatgttaacattatggcatgtgagatatttaaaggttgccatacattcccctacattcccaggacatttgcagtctaattttattttattttttttgagacagagtcttgctttgtcacccaggatggagtgtaggggtcttggctcacttgcagtctaattttagatatgtaaaatgagcctcgtggaattagtaaaagctttcccacgtgccttacagcagaagtgttctctacactgtgaatttttatttctcatgtaaggtataaacatttaatgaaatctctccacattactaataatggagcctcagtccactctaagtcactaaatgttgggtgaagtcacatttatgactttcatagtaaaagaaactttctcttcttgatggtctttgattttcacagggcctatcaccacaagagttggaagtgagtattaagatctgatgagcacttacagacttcttcacatgtcctacattcatagaacgtctctcctgtgattgcttttgtgtttacactaacactaatgatagctaatgaacggaaaaaataatcacaaaaaaattttattatgtttgaagaaagcttaaaaatttgtgttggtctgcattcaaagccatcctggcctgcgggttggacaagcttgatctaaagcttttcccaagttcctcacagtattagtttcctagggttgctgtacaaaataacagactgaatgatttaaccaagagaaatttattgcctcacagttctggagcctggaagtgcaatatcaaggtggagacagggttggtttcctctggaggccataatgaaagcatctgttccaggtctctgtccttggcttgtagatggccatcttctggtggatccacacagtcttctccatgtgtatccttccttcagtttcccttatagggacaccagtgatgtcagattagggatcgaacccaacaacctcatttgaagttactcacctgtttgaaaaccctatgtccaaatacagttatagtgtaaggaactaggacttagggcttacaaatatggagtggggcatcatccagaccataccatttaaattgcagggtttctctccaatgtgagttcacatacacacattaaggtttgtgggattcagaaaggtattcccagattctctacattcatacagtttctctccagtgagatttctgatgtgtttggtaaggcttgagaattcagcaaagtcatttccacattccctgatgcagggtcttctccactgtgaattcatatgtgttcattaagacctgagatacaaagttgcttccacatttttacattcatagggtttctccccagtgagttttcatgtcttcagagagaacagggacacctttaggttttcccacattccttatgctgacagtctctcatccgcatgccttctttcatgatttcgaaaggaactggaagaactgaaggctttcccgcactccttacattcatagggtttctctccagtgtgagttcgttcatgtaactgaaacgaattggagtaactgaaggatttcccacactgtttacatttgtagggtttttctccagtgtggatccgcatgtgaaggttaacacacgtgggaaacttaaaagctttgccacattccatacacgtgaatggttttttggcgctgtgggtccgcatgtgattattaagactggaggaatgcgtaaatgctttaccacattccaggcactcaaagggcttctctccagtgtgaattctcaaatgtccactaagatttgaagaaatagcaaaggctttcccacatttgacacattcaaaaggcttctctccagtgtgagttcttgtatgttcactaaggcgagaggatctggcaaaggcctttccacattccttacattcatagggcctctctccactgtgagttcgtgcatgcttagtaaggtctgagttctgagtgaaggctttcccacaatccttacatttatagggttttattccagtgtgaattcgaaagtgatcactgaggcatgaggaatttctaaaggattttccacatatcttacattcaaagggatcctttgcagtgtgagtttttaaatgttcagtaagttgagaagatctagtgaaggctatcccacattccttgcattcataaggcttctcacccacatggattttcatatgttgacttaagcaagaggaaacagtgaaggctctcccacaatccttacatttataaggtttctctccagtgtgagtttttctgtgctgagtaagttgacaagacctggtgaaggctttcccacactccttacactcatagggattgtctccagtgtgggttcccatgtgaatattaaggtatgcagaatatctaaatccttttccacattccttacatttgtagggtttttctgacctgtgagtttgtatacgcacagcaaggtctgtggagtgaataaagcctctcccacattccttccattcatggagactttctccattgtgagttcttaaatgtccctgaaggtgtgaatgattaatgaaggatttcccagagtcactgcaatcaaaagctttctctcctgtgcacgttctctggcaaacaacatctgggttcaggctgaaggcttttccacactgactaaatacagaacgttgctctccagtagaggttttcttgtgcagagtaaggaagtctactccatacagataacactcaaatgtgttctcactattttgagttctcacatgtgtcttaaggcatgagtgttcactggagacatctccacattgcttaacatcactgacctcccctccgttgtggcttcctatctgttgataaaggaatgaatgatgattaaaggacggttcagattgattaacagattccactcatctgaagagaggaacactgtgatgattattatcatgtttaccattttcattacacacatataagtaatgcccttttgatttctttccagcggaatgacaaaaaactcctgccaggctgtgccatctactctaatctcaaatgtctgtagagttttatgaaattgtcttaaaaactcactatctagttacaaatgtgtacttgaggggaactctaaaacacctaagtgttggctgggcgcagtggctcacgcctgtaatcccagtgctttgggaggccaacgtgggcagatcacctcaggtcaagagttcaagaccagtctggccaacatggtgaaaccctgtctctactaaaagtacaaaaactagccgggcatggtggcacgtgcctgtactcccagctactcagcagggtgaggcacaagaatcgcttgaacccaggaggtggaggttgcagtgagccaagatcatgccactgcattccagcctgggtgacagaccaagactctgtctaagaaaaaaacaacaataagtgtcaagctagatttcaagcatccccaggtcatcgtattctgagtctctctccagagtcattatcccttttgggaatgctacttatctcaaagagctctcattctgctaattttctttttcttttaatgtaattaaatttagtttttagcgccaagatcttgctacgttgaccaggctggtctagaactcctggcctcaagtgatcctcccacttcagcctcccaaagtgctgggattacaggtgtgagccaccattcccagctttattctgattttctataatggaatccccaatcatctctaaatgtgaaaactaagacgtatccttgttaatcttaccatttgaatcccactggaggttggctcccccaaaacatcctgctgaagggctaactctttggttttaagttgcactttccattctgaagctgaagagaaaaagaaatgtaagggtttggagacatacagggtagacagatggagctgaaaatgagagggatcatttgtacttgttttctttttttcttgagacggtgtctcactctgttgcccaggctggagtgcaatggcgtggtctcagctcactgcaacctctgcctctcaggttcaagtgattctcctgcctcagcctcctgagtagctgggactacaggcacatgccacaacgcccagctaatttttgtatttttagtagagacgagatttcaccatgttggccaagctagtctcaaactcctgacctcgtgatccacacgcctcagcccctcaaagtgctgggattacaggcattagccaccacacccggcccctgtatttgttttcaaattaaacacggtaacaaaaaacaaacacaaagacagatttgaagattgtatatcaaaaatttggcaataataaggatatagcgtcaaaattttacatagtttactacaaactgattctatgaaaattataaactgatggtgaacacaaagaatattaccatggaaggaaagttgaggaatagaacaaaaagcacacatcaaaacaaggagcttgtttttgttttttgtttttttttttttttgagaaagactttcactcttgtcactcaggctggagtgcaatagaacaatctcggctcactgcaacttccgcctcccaagttcaagcgattctcctgcctcagcctcccgagtagctgggattacaggcacctaccaccaagcccagctaatttttgcatttttagtagagacagggtttcagcatgttggccatgctggtctcgaactcctgacatcaggtgatcctcccacctcggcctcccaaagttctgggattacagacgtgagccaccgtgccaggccttttttttttttttttttttttttttgagacagagtcttgctctctcaccccagctggagttcagcggcacgatcttggctcattgcaaccttcggcccctgggttcaagcgattctcctgcctcagcctccctagtagctgggactacaggagtgcgccaccacgcccagctaatagttgtatttttgtagcgatggggtttcaccatgttggccaggctggtctcaaactcatgacctcatgtgatctgcccgcctcagcctcccaaagtgctgagattataggcgtgagccaccacacctggcccaaaacaggaacttttaaagaagaaaccaacgggtcctatcacagaaaagaatgagtagacaaagcgtaaaagtatgagaagttgaagatttcttaacttctgagaaagaaatggcctacctgggcatggtggctcatgcctgtaatcccagcactttgggaggccaaggcaggtggatcacttgaagtcaggagtttgggaccagcgtggccaatgtggtgaaaccctctctccactaataatacaaaaaattaaccaggcgtggcacacacctgtagtcccggctactcgggaggacgagtactcaggagaattacctgaacccgggaggctgaagttgcagtaagccgagatcgcaccactgcactacagcctgggtgacagtgaaactgtgtctcagaaaaaaataaaaataaaaaaaataatggcctcaacactgtgagatgaagcacatcttaaaaagtttcctcattatggctaagcgtggtggctcacgcctgtaatcccagcactttgggaggccgaggtgggcagatcatgagatcaggagtttgagaccacactgaccaacacggtcaaaccccgcctctactaaaaatacaaaaattagccaggcatggtggcgtgagcctgtaatcccagctactcagggggctgaggcaggagatcagaaggctgaggcaggagaatcgcttgcacctgcgaggcggaggttgcagtgagctgagactgtgccacggcactccagcctgggtgacagagtgagactccatctcaaaaaaaaaaaaaagtttcctcattatacttataaacatactgaacttattgaccagggcggtcctttgtgaacactcaccttggaaatcacctctctgcactgtcctagactcttcttgttccagccaagagatcagactgggtttgaagagctgatatcctgtgcacaaagaaagatacattaccagaagaggctcatgcaagagatgataaatctttccacaactcaggagatatagttccaatggaagcagtgaaattattttaaaagggctaaaaatgcaaatatcgtctgtctgtgcccccaaaagattggtgatctctgatccctgaagcccaaatccaggctgatgtacacacttacaaagcactaagacttttatccaaataggaagttaagtgaaacaaagagatcttcattctcatgggaaacaactatacatctcattcttcaacattatagcacatcagattcatgagagcttgttaaaacacagatgacaggggccctgttgcagtttctcactgagtatgtcaaaggtggagactgagaacatacatctccaacagtgctggtgatgctcttcatctgacaccacattttgagaatcaccaagtagatgaaaccctattagggcagggactatgtctgttatttcccattgtgttcagagttgctatctctgatgtgcaatacagtaagtacataacataatctgttccatagtaggctacaagggatgaggccagtcttacctactgtggccaaattcttgtagttctccagcatcacatctctgtagaggtttctctgagttgggtccagtaaagtccattcttctggggtgaagtccacagccagatcatcaaaagtcactgaatcctaaaccatcacacacatgctggcttgagccacaaaacatgtctaccagtgttcactgcaaaatgcaatacctacagagtctgagggctcacattgcccaccccaggaggtcctctctatccacactcactcactgtcagtcccctccagtgacacggcttgaatggcacttcttacacatgattgtatgtaacacaaccagactgggaggtcatctgatttccctccactgcagcacactcttgagcagatgctagataaacactgatgaatggaaagattatctcaaaggatactttcatgtcccttaccatgtgtcagaacactcaacaaaataaaaactatgcagttgggaccatgagggaagactaattaatcaatattgaaatactgggatgacattcaaggcaaaccctcaccaatatgacaggctccactccttccgggaattcgactagggactcagtccttgaaggaggctttatttgctttaagaagctctgaagataattctgtgtagaaggaaatgtgtctacctggtgatgcaagtatgatattttggagaaggatatacttcctgcatacctgataacaatttgtcagacagtcagccaccaccctttctacttctgtcttttcttgaaggcagactgggtccctgtaaagacctcatggaaaagaaagaaggcatgagaacccagggctgacgataattcccacattcacgtaccccaaagtcattccatcctactgtgagattcctatatactcccgcacactcaagaaaacacacacatacacaccaccgctatcaattccagggcactactgcctcacgtaaaggcaaaaaaaaggatagtcagccatgctgcccactgggaaaagggtaacagtcttattttacagataaggaaaacttctcttccctggaaagacacagcacctcttcccaaagcacacacagcagggggctgatgaagtattctggctgggcgtgatggctcacacctgtaatcctagcactttgggaggtcgaggcaggcagatcacttgaggttaggagttcgagaccatcctggccaacatggtgaaactccatctctactaaaattacaaaaaattagccaggtgtggtggcacacgcctgtaatcccagctactcgggaggctgaggcaggaaaatcgcttgaacctggggggcagaggtggcaatgagctgagatcatgccactgcactccagcctgagcaacagagcaagactctgtctcaaaaaaaaaaaaaaaaaaaggaacaaagcattccctagcccacatcagcacctcagaaatgaagctgcagcgtgaatgatcaggcacaggccactggactccatactgtgtggggggggacacctaaagcagggtatctgaaaatgaacagaaacaggacttaccataggacaaatcagtggctgccatcccacagggctgatggctgaatgtgcttcaaagcacctttcctttactccaaggatcactccaggacagcttaggaatctacacggacagaggtaacctccattctctttatccagggttaacggtatcctgtttgtataaatcattaatcaacaagcattacttatcagtcatcagacatcattagcactctctctgcagagcatatagaggaaaagacactgaaaacggtgtacactacaaatagtaggaagaccaacttccactactgaggaacagtgtgtgtcagaagtcacactagcagctttatatactcgcttaattatcataaccaccctttacagtagataccaatgacccctatttgataaagaaaaaatcaggccgggggcggtggctcacgcctgtaatcccagcactttgggaaaccaaggcaggtgtgtcagttgaggtcaggagttcaagaccagcctgggcaatgtggtgaaaccccatctctactgaaaacacaaaaattagctgggcatggtagtgcatgcctataaatcccagctactgaggaggctgaggcaggagaatcgcttgaacctgagagacagaggttgcagtgagccgagatcacaccacggcactccagcctggcaacagagtgaaactctctctcaaaaggaaaaaaaaaaaaagaaaaagaaaaaaaagaaaacctacaatcagacaacacttggatttggtccagaatcatccagtttggaagttgtgaaccaggacttgaacacaggcaattttgtccctgacacccaatctgtggctgctcttactttcccacatgaccagcgttagtctaaacctgcacagtacaacaccatggtcactacccacatgtgttattgaacacccactccatataaaccgagtatgacccaacaacagaatgtattttaatttaataaaatttatacaattaaaataaaatttaataaaaattaatcacaatctttaataaatcaaacacagaacaacagtgcaaatgctgattgacagaatggaatctgaacgatgaaaatcactgaaaactgaacagttcattatccatgaaccagatacacccccacaaggacgctacagcctttattctatgaatgagaaggctgaaactctgaggtcacactgggttacagaaaccccatgtctagactcctggtgtagattgtacccactaccatgggtttcaaactggggatccttaggctgaagagggccacaaatgtgtttaatttggtgaaatctaaaccaattatgttattttaaacttgaaatgtaattaatgtacaattaaaagtacagatcttaggtattcagtggatgaattttgacaatcgcatacacttgcataatcaaaagcctaaacaagatataaaacatgttcgtctccccatgaaaaccttcttgccccttccagtctatcttttcactctcaactccagataagcaccctgtgatttccttcatttagcagacacaacactggacaggtaaattaggcagtgtgctcatctctcgcaaatgtacatcctatcttcatttttctctactatttaaataacatgagataaaaattctaaaatctcccactgcaactgtggacttgtctatttcttcttgtgtatctgtaatgtatactcctttatacatcttgtaacaacattactgggtagatagatacacacattgaactttcctatttttggagcaacaaaacctttctttttttttttcttttgagacggaggctcgctctgtcacccaggctggagtgcagtggcgcgatctcggctcactgcaagctccgcctccaggttcacgccattctcctgcctcagcctcccgagtagctgggactataggcacccgccaccacacccggctaatttttttgtatttttagtagacacggggtttcaccctgtcagccaggatggtctcgatctcctgactttgtgatctgcccgcctcggcctcccaaagtgctggattacaggcgtgagccactgcacctggccacaacaaaaccttttttttatcataaggaactctgcgagtctctaggaatgttcttggatgatgctgggtgacactgcaacttgcttttctttgtggagtctctgtatctcatgggcagccttaggtatctttgggtgccaatgttccccttgacctggcatggagcctaaaggcacccagtgatggctggacagacaactgagatccttctcaacactgttaaagtacacccagactacagccccatcacaattcataacacaatatgcatctgagttctgaggaaatgcattgaactactcaaagaatgcaagggtgacaggaatactgtctctttctatgcacttagccaccacccatggcctgtctgcataccaaagactggtttcccctggccacttaatgtggatatttagtgctctcagtcttgtatccttactggcaccccaacttcctctgctcatgagcacaatagccagggttgcctgcattccagagggctgcttcctgctttccccgagtccaatgactagctctagtacccgctaaaagtgcagagcagaagcactacagccccgctaaaggctgaccctgaagggggcagtactaaaggaaaatcttccgagtggcagaacttcaggcagtgtattggcctgcttctgggtctggagtaagagttgacaagatgcatgcatacacatacacagattcatcaaaagttgccgatggcttggctggatggtcaaaaatgtggaatgaaccagagtggtaacaaggaaacctaggaaaaggtatatggatggacgtctctgaaaggaaagattgtgtcccacgtgaatgcctgccgtgatccactagaaatagagcagacaaaatcacgtgctctaaagatacctgttactttacctagctgcacctcagtgcttgctcaatgggcccattaaaaaatgttcatgacagcagggataaaggctatgtgtgggctcagcaataaggacttccccttaccaagtctgacccagctaacattactgctgggcctaatctcctgaaagcagaaatcaacactgagcatccaatacagcaccattccttagaggagaccagccagccatgctgtaatgggccctcttctatcaggaaattgtcaaagactcatccccaccagaacagactcacgttccggtgtggatctgcctttcgactagttaggcttctgctggcaccaccacccacggaatcacaacatgctttatcagtagtcatggcctccacacaacagagtttctaaacaagcaaagcatttcactgcagaggaagtgcaacaatggaagcatgtccttgaaatcaactggttccatcacacaccccatcactcagaagcagtggatctacatgaaaagtggaatcgcatactgaaaactcagttatagggccaaatgggggacaacccttagaaaggaattctgactcacaggtcaaggtgtacgctttgagtcataaagccttccatggtactgtctccccagagtcagaatacatgggtccaagaattgatgagtaggccaggcgcggtggctcatgcctggaatcccagcactttgggaggccgaggcaggtggatcgtttcaggtcaggagttcgtgaccagcccggccaacatggtgaaaccccgtctctactaaaaacacgaaaaattagctgggcgtggtgacacatgcctgtaatcctagctacttggaaagctgaggcaggagaatggcttgaacccgggaggtggaggttgcagtgagccgagattgtgccactgcactccagcctgggcgacagagcaagactccatctcaaaacaaaacaaaaaaatagaattgatgggtgaaggtggaattaactccactgacagaagtttgcttttattcccagcaactcagagcactgctggtctggagatcttcttagaccctagaggaaaatgccccccccagggggcacagctatggttctaatgcattggaacaggagactgccacttggcccttttgggcttcatataccactaaaccaagaggcaaaaaaaaaaaaaaaaaaaaagaaaaaagttaatctactggctggagtggttaatcccaattatcaaagggaaactgtggcactactagacaattgaggcaaggaggatgaagtgatgaggtgtagaacctccgagtacttctatactccatagaaaaggttaatggaaaaccacaactgaacgaaagcaggacaacagaggattcggactctgggcgaacgaagatttgtattgctcctccctggtacaaaacccggagcagctgaggttcaagtggagggcagggaaaatatggaattagtcactgaagaagtaaaccatggacatcaactacaacctcaagagcagtgacagaaacaagaaatgtagttttgcatgttttctctctgcttgttatacgtatgtgtgtttatatccatgtgtttatttatttaaatgaaccatttacttctatctttttcccacttttattttatatacacattattagaggttacatttataattttgtctttaagaaacagaatagttagaatgggactaaatttgaggagtaattgacatggcgtgccatgggaatacaaaggactgtttgaactgcgcatctgctcctttgggggtgggtgaggacttcttccctcatatcttcttaggtaggaatatagacttgtttaattattccaaagaaattcctatgtgtgtaggagagtgcatatggatggtaaagaaccaaaagtgaaatatgccagttagctgtttatttatctcagctccaatacccccatcgtctttgtcttagttaaaacttcccctgcctgtgtagctgtttgttatacagcctgcttgttcctcacctcactggccccaaatccaacacatctcacagctgctgactacagtgaaacttagtggccaacaccagagtcatataaataagaactttcctttgcgcaaccaatccacaacccccaaaggaagtcctgagggataacgtccatgcaccttaataacgcaaggcccaacaggtcctctctcattcctatcccacaggttgaacacccggctgtctctggacttccatcagcccccgagagcagcctcccatcctggggatctgtgagtaggaggatgcttctgacatttcatgtgttttgttgtgctgcctcctctacatcttgcccgcccaacacactggaatgtaactctcctcccggtctgggtagggctagaatttgcagccactctccagagagagagagaccccctagaccaaaacagaggaaaatatattcagtgtggtgaacagggtgtgtggtcacaacctgagggacacaagaccaggccttcagattgctcttggcctgtttactacctggcccactcacatggctgatgccatatgggagggctccacagcctgctggggtacctctctgctgctgtgcattgctgcctgttgtctctgtgaagcactgccaatactcccatccctaaattgggtgggtcctccatagtccaagcgctccctaggactcaccaactgctagccttaagagggcaagaggggcacgacagtcactatccaagactgctgtcacttccccaaataggaactgctgggctggaggaagccaactgtattcccaaggcctcactctggcataacgggcttgctactgagaggcagaaggggtaaggcaggcgctgggccaatcaaagggttagcggagtgcaagaggaagaccggcattctgactgcccactgtatggataagcagtacagacgaggccaccagacttcccactctgacaacagtagcaaccccttcactggggagatgacggcacctcgctggcaaggttgctgttggggtctgctatccccaggacactgccttccattgcatctgttgctctacgcccccaccctgacgaggtcaactgggcaccctagagagaaaggcggctgcctacaaaggggtcagatgggaagcacaaatggaggccagaggacccggggccactcgggaccaccgggagcttgtcaggtaaacaaaggaaaaaatattttagccacctggagatacaagccattctgaagattttacttagaagaaaaaaatagagggaaagaaactgattgtcttgaggtctggagttcccagtcctctgttgcctagaagcactgggcgccttacccctccttcttttcctcttatcaaccagagacagaaattaagaacccttcaggcagttaaaagtctaagaccaaaaaaaaaggaaaaaaagcctcgagatttaggaggttacaagttcaagaaaaaaaaaaagaggaactttttgaactttaagtactaaacaaatgccaggtctaacaaacataatcccgctggccctagattacttaatgatttaaacacagaccatgagacatggggaaaaaaataaaaggtaactagactttaactaacatttggtaaaatgtaccaattaacaaaactgcataggcctactcaatctggggctcaaattacacttatacctggggatcccactaaattcaaacattgtgctccctaaaatcttaaaagggtaactaaatacaggagaaaaaaaataggtacgcctcgctttaactgtagccttgcttaaatctcccattgtcatagtacccatggccctaaaatattccatattaggtataaatatgctaacataataaataacaaattaaaattaaagtgagactttgacacttacaaattggcttgataaaatgggaccccatggataattagttgaaatatttcacatggcccaatgtaagttacaacagggcctcaaggatgaaaacttctataaaacctaattaatgaaggggtgattatccctactgcttctctatttgacagcccaattgtgcctgctcttgaatctgaaaaagaaaataaagggcacctcatgctggattactacagccttcatactgtggtcccatccatcaaggtgcccacacccaatattattaaaactcctgattttattcaataaacaaccaataactattgtgcttttaattataaatttgaccaacatgtttgtttgtttttttttctgagattgagtcttgctctgtcacccaggctagaatgcagtggcacaatctcggttcactgcaacctccgccacccagggttcaagggattctattgcctcagcctcccgagtagctgggattacaggtgtgcgtcaccatgcccagctaatatatatatatatattttaagtagagacagggtttcagcatgttagccaggctggtcttgaactcctgacctcaagtgatctgcccacctcggcctcccaaagtgctgggattacaggtgtgagccaccacacccggcctggacaacatgccctgttcagtgcctatttcaacagcctctcagctgcagcttgcctctccctccaatgggacacaacacaccttttccaggctacccaacagatctgtcatcacatacgatctttgcaaacgagatcttaacaacatccaccttctccaggaacacaggtatgcaccgcaccgataacagccttccccaaggaaactcttgacatgtcattaaggggaagtaattccagtatcttttagtaatttttgggttctggtggcaacatatgcctgatttacaaattataatttaaattaaaatcaacaagcactcctattaatgcctcgaagaaaaaaaaaagaaaacggggggaaaaatcaacttcctaaaaggactcccttcatgctagagactggcaactttttaaatgcctgctggagtctctagaccacttacgatggtcattagctgccccaggccgtctaggagagactgcccctcctgacttcctgttattcaccagtaaaacaagtgactggccatctactgggctctcctggaaacagaggatctcacagacctgagcctgtgatcctcctatgcagctgcccactgtgctctaggtcagggaaacaaccccccataagctctgcctggccactgaggcctccttaggccacgatgaagccaatctcaggcccttgggtctaatccacccgcagaaggcagtggcttcccctgttctcagtcccttgcctgatgccagcgtgctgaaggtggtcactcctccctcccacaggtcccctgactacctggaaagcccctgggattaactaagtgaacactaatgggagttcatagactgtgcaaaggccactgctgaccattataagtgatggggctcagtggaatgctgctgccttccatcccttagccaggatgtccctaataaaggacaggacccaagaaacaacgtgcctggccaaacttcaggcagctgtcttagcgctggatgcccaggtcaacaaaccgacccaccttcttcatggttacaataaactattgggtcattacctaaaaactgtcccttccagggtgggaaaaaaaaaaaaaaaaaccctgggaatctcttgtctgacagatacccaaaatataaagcaaaatcccatacctctccaaacactaaaggcacaatacgaggccttgccaggacactacttattcccttcagagttacagacattattagtaacctacatatatatttcacttcttttttgtcaatttaattttttttttaagaggcagggtctcgctatgttgcccaggctggtctcaaactcctgggctcaagcaatcctcccacttcggcctcccaaactcctgggattacaggggcgagccactgtgcccaacccatgtttcatttcttaaaatacataatgctagcgcctcgaaaaatatattcaatagaactttcatttccctaataggtctcagataactggtttcactgaaagacagaaaaatgtcctcaaataactacttttcaaattccagtccaaaaaacaaactcctgaaattctctatcatgctctagggcttaacttattttcaatcttgcccccatcccacaaacactgaaggccaaatcgagggtgcacagtcgcctgggacttactaacattagattgtcccagaggcccggcagctgctcatctgataggggacccacctgaacctaaacttccaccaaaagacagaaacaaaaacatgttgtcaggtacagctacatatcattctgttaacggttcgtcttactagatgctttgttggtttacaacctagagggccacatctacttcaatgggtatccactttataccccagtgacatcctagacgaccttgtcctagcccaaaatatcaccgctggaaacaacattgcctccagcaacacagccctgacccaagactctgatggtggagatgactccaccattacactaaaacctccacacagtgacatccgtggactgcctctcctaaaacacaaatggacacagaacatttttttctttctgaactgtctgcttagcccctgatcctggtagcgtacttgcattctgctcaaatgtgcacacccacatacccaagcctgaaggaaaatctggtaggagttactaaaattaatggagattactgttttccccaagaggcacctgcctcatgtcggtaaactccttaaccccagggaggggaccacctactccatgatgccttctaatgaagaaggaattcatgaattttacaagtacaatcaaagacgagcaaaaatttttactttttcctgcaaaagctaagtgtagcgtagcccctcctcctaccccacccccccacccagtagcctaagagagaatactaactgcctgtttttccttctgtgctcagccagccttatctgtacttgctagtttcacactccttgaggctcagtgagttcctgcttcacctccctagcgcagctgcaaagttacaaggttaatacagaaacatggtttcccagggatgtggaacatgtagtatagataaatgtaaaagactgatcaactgccttcgttctcgcttctgtaagtacgcttcctgtatcagtagctcccggccagagtgctttaaaggtggctgctttctttgtccagggctcagactttcctggatgccagtcctcctgagccaggtgatcaccttttaaagacctttcctgaactcactctgttcagtctctcccatcgttgatcgtcccgcaacactactacccttctcactttctatcttgacctccagccttgcctatccaaccacaccactcttgccccttggttacacacaataccactaacctttacatatgctttactaaatcatcagctcataccctccaacataactgccctacatctatttttaggcctgacataagttatttggaacccagtcagaccccatcacctttggcttacttaaaactttcccctccctgtgtgctgtttgtgacatagcctacttgttcctcacctcactgaccccaaacccaacacaccccacagctgctgaccataatgaaacctactggccaacatcagtcatgtaaatcagttctccccactgctcaggtctacctaatccacaaccacgctgggaaagcctgagggataaggcccatggaccgtaacaaaggcacagtcccacaggtcctctctgtctcattccccacccactggttagcacccggctgtctcctgagttgctgtcaggacctcaagggcaaccctcttctcgcggatctgtaaggaataaaatgcttctgctacttgatgtgttttgttgtgttgccttttctgtacctaacccacccaacacaccagaacacctctcctcttggtcgggacagagctagaatttacagccactctccagagacagaagcctcaggacctaattagaggaacatactaaaaggggacatgggatggacactgcaaaagggagcgttgcctgctggatacaattgcgacacggtggtcagcagtgtgggtgtgagggcattggagggtgctctgtccacgccatatgcccataacacagtccttaggataccacaaaaccctggcccagtcaccaccaccctgtggccctcctaatatggacgccacatgctcaaaggactcccactagcagaggcaccctctgcacatgtgccgactggcttgatggcttgtgtccctcatgacacagacaatgcgcatgccaggatgcatgctgctgcatgacctgtaccccaaaggtttgttcccaaaggcctccgaacgtgaacactgaagtcccaggccttgcaaacaaagtggcatccaaatttcctgtgcatagctgcccatcaccatcagtgtgagtgtgccccagaggtgtgtttgtcacagcacttccagggcagacacgaaccagtccaagcctcatagctacagtggtgtcctgactccccctacaggctgatccacccattgcagctggcctttgccttgaaacactgcttcaatcttccctaaggactatgactaactcccgcctgagtaacccagcaaacttcaccatccagtgggctacagccacactgtggccaaatactgtaatatgaccccagagatccccacctgctggcattcatacccctggataacaccctcctgttgagcgcacgcacgacctttgaccagtttctaacagaagaataagcaaaaatgaagagaatgcagatgtaattgaggtctcaagtcagttgggttttgttttgttttgtttttagacagggtctcactctggttgcccaggatggagtgcagtagcgcaatctcagctcactgcagccttcacctccctggttcaagtgattctcctgcctcagtctctcaagtggctgggattacaggcacccaccaccatgcccggctaatttttgtattttttttaatagagtcagggtttcaccatgttggccaggctggccttcaactcctgacctgaagtgatccacccaccttggcctcccaaagtgttgggattacaggcgtgagccactgcacctggcttacttttatcttgatacacatagtgtatacattactgttgctgtagggcatgtatgtgtataaacctagtatgtactgccaacagtttttgaaattggtttgccaatacactctccaaaaagcagtatatgcacatcctcagcaactttatatcagaatccccatcaatgatttcactacatgcggctagttcactggaacccctaagtgccaaacagagaaaatgtatagaatttaagtcttcacttaaagtcatcagcaggttcttggaaactgagactttaagcgaaatgacatacaacaaagcgaattttttcacatgctaattaatataagcgagttaagctcctacagcatatttctggtcacaaaaacatcactaaacttctaaataaagaccccaaacacttctaatattaaatattgaaataaatgtgaaatatatatacatttaagaaagactaataaaaataggctatttatccaatttttgatgaattggtatgtgatggcagttaacagtggtgggttaaaacaaataaatgcttccaaagcaaaaactctaaggaccacctcctaccaccaagaagctcaaaaacaataacaaatggggccagcttgctaagtggtaccatttactgttgtacagttgtatcattatcaaatgttttaggaatttttattttacaatagtttgtattcattcattcattctccaatccacctattccagttccagaatgaaaatggccagagcccatcctaacagctcagggcacacacacacatagtgggacaatttagacacaccaattaagctaacatgtgcatctttggcatgtgggaagaaaccagagtacccagagaaaacccatgcagacatgggaagaacgtgcagaatctacagagtggccctactggaatttgattttttttccgtcatcgatgttataattaacagacattattctaagatctgttgtatttccaggccatgtggccccttcacagctttttggcagcccacattggcaggtgagttttctggtcatttacttacatggattgtatcaagccaaccccctaggtgtatgagtgtctataaggagtcacgcagagtgcttactctggacattccttcagggaaacgaaggactaatttaggtaggagaaggaacccaaaagtgaattgaaaaaaacaacgagagaagttttgtctgtttatgaatatacatatttcctaagactaataattaacatcagtgaattttcatggagagcttatttttcagtgatcaagcactgattctcattaatcccttgaattaatttcttattcatgtaattaaaacacattcatgcttctcctattttcccttgatttacatcatttgtcagatatcacttactttggccaggcacagtggcttatacctgtaatcccagcattttgggaggccgaggtgggtggatcacttgaggtcaggagtctgagaccagactggccaacatgctgaaaccatctctactaaaaaaaaaaaaaatacaaaaatacaaaaattagccaggcatggtggcgcacacttgtaatcccagctactagggtggctgaggcaggaggatggcttgaaaacccaagaggtggaggttacagtgtttcagtgagccgagatcctgccactgcactggagcctggcaacagcgaaactctgtctcccaaaagatatcacttactatttcctgtcatacatttaagattaaattatcccaccacattgtttccccaaccaaagaaagaatactgactctgtcaaacctgggagtaatctttgatgcactcctctctctcaccatagaagtggagtcagccaattcacagaatgctttgcccagctcttatttccttccccttcagtatggctaaatcataccatatttttggtctcagcttgcatatcactcttttcttagcattgcctattccaaagaaaaatagagaaaataattctgtcctctactttacttacagaccttcatcaatttgtaatacacttatttgcttggttacatgacagcctcctccactagtttacaacctccctaagaacagccctaggctgaatttttttactatgccttaattaaccattcagacactcatccatttacaggatacaccaataaatgaaggatacatttaaacacggcacagaatacaatcagaactaccaaaatgtataactttctgaaagaacgagtgactgcgcaaaaagacaatataacggataaacagtgtctgctagttttaaagagactaaaagacatgaaacttggatacgtaatagatcccaaaacaatcaaaaccatatattggaacaaagtggagaactgtacctttttacacagggtacatattaacaacattttaaattttctggggtaatagtattatggttttaaaaggacatgtctttatccacaggacacgtattaccaagcatttaaaccttaagtgtcacgcctgcaatgttcaacttacttcaaagcctccattccttcttcctaaaagcccgttttgaagctctgtggggaggtacaggcctaggaagttcagataaaaagaatagctgagtattcttgcttttcttcagtagaaagacttctggtctacaaacgtttatattcacatagagaaataaccacaccccagatacctaaaaaatagctttatgtttctacctgaatgtagagtgtcaaaagtaaatacaggatgcgcaaagagaaaaacaaattctcagataaaacaggaggaagaagcccccgaaaccaactttcaccccagtactcaccgcgacgagctggactcgccaggtacgggagattggggggatgaaggaccagtcaacctgattcgaacgacgaaaactcgttgtttctggaaaaaaaaaagtcacaaagaattgctttggaagagtttgaagcggcaatcaccgtgtttgcaaaaatcgtgaggaagcgcccttacgacagatcccgaaacggctcctggcccagggccgtcgcagtgacaactcgagtggctttttgaacctggcggcgccaggaggacccgcgcggccccggcggacgcgagcggagcaggcaaggtctctctaaggaggcccctcggcggcctggggcaaaccggtactttcgccaccccttccaccgctggctcccacccgtcatccgacctcgccaaagctgtattaagcccaaacgccaccaggaagaaaacgggtttggcggcgcggagaaagcgccggaaaacacagcagcgctccgtgacgtcacttccgcctccagcctcaaacctggaggagcgctcgggaactgcaacctcagccgagctgaacaacctcaggcagagagattctggtttactccccagtggctacggagacgccttggaggccttggagtctgctcaccttgagggatggaggccaaaaggggcccagagcacaaggctgaggttagaaccagccctgcggacggggctaacctagggtggggtcggtggtgttggcaaagttagaggtgggggctcccccacaggatgtgcacaatgctcacaaaaagcttttattctcacctcctcccacgttcctagcaccctcaaaatgatgcttcctttgataatcctgccagtccatgatatggcctatctcctccattcattcaatctagttttagttttttattttgtttttgtttgagacagggtctcactgtgtagtccaggctggcgtgctgtggggcgaaactcatgggctcacgccatcatcccgcctcagcctcccgagtagctgggtctacaggcgcaggccaccatgcccggctaattttttttcccccagagttgaggtatgttacccaggctgatctcaaactcctgggctccaacaatcatcccgcctcagcctcccaaaaggctgggattacaggcgtgcaccacggcgccgggcccaattcaacttgaggccaatatttccccttatttcatttatctggacgccatgctaaattctaatagttgattcctttgtgtattcaatatgctgatactttttgtaaatgttgatttttttttctttgactaatatattgttttctgagatcttacagtgagttccagggcctcgttgtaaaataccgcgttgtaaaatagcactgatatcaggcattcacttctgcaggagtgattctagtttctccagaaatcgtttttgctgtgctttgtagtgggtggcctttatggagttaataaagttattttgaacactgttttactaacatgaagaactgttcatgtacattatcaaatattttgtgaatctactgaactggtaactattttgcagttaatttttcaactcaaaaagattttcttttttaagtttcctctcttgcattaagaagtcttcataaactctagattacatatagatttcctaattttcttctgcagcatattactttaaaaacattgaaatctttcatactcatggaatgtgtttcagtatgtggtgtgggatagtggatacaatatctctttcctccagaaacacggccaattattgtagtaccacatattgataaactgtccttgatttactgatttcaaattccatgtttattaaactataaattcctatgtatacctgtatctgattctagactctatgccagtaatacatttacttatgccaatatcaagatcataatcttttcattccagtggttttgtatcaactaataatattccgtggtaataataataataatggtagcttttttgtttgtttgtttttgagacagtcttgctctgtcacccaggctggaatacagtggtacgatctcggctcactgcaacctccacctcctgagttctagggattctcctttctcagtctcctgagtagctgggattataggcacgcgccaccacgctcagctaatttttgtatttttttttttttttttttttagtagagatggggtttcgccatgttggccagggtggtctcaaactcctaacctcaggtgatctgcccacctcagcctctgaaagtgctggtgtgagccaccgcacctggcggtagctgttttttaaatcttactaccctaaatgcttaatagacattaaatttttacgctcccaatgatgtggctattattgtgatttttcccttttggtttttagaccagctgtattgagatacaattcacatataaccaacacagttcacccacttaaagctatataattcaatattttttagtacattcgcagtgttgttcaaacataattttggaacattttaatcacactaaaagaaatctttgaatgggaaaacccatttacctcctctttaagctccagggaaccacaaacctactttatcactacagatttttcttttgtagacatttcatatggatatactcatacaatttatttttatttttgtatagacagggtctcactatgttgcaaggctgatctcgaactcctgggcttaagtagtcctgcctcggcctccaaaagtgctgggattataggcgtgagccaccatgcccggcctaaaaatcatacaatcttttgtgaataacttttttcacttagcccgtttttcaaggttcatctgtattatagcctagatcattctattttattgctgaatgatattccattctatgtatataccatatatgatttgtcttcagttgatggacatatggtttgtttccactttgggggtgttgtgattaatgctgctatgaaaattcacatatatctttttgtgcatactggcttttattttttgagaaatcacagctcactgcagcctctacctcctaggctcaagcgatcctcccacctcagcctcctgagcaactaggaccacaggcataagccaccacacccagctaatttttgtatttttttgtagagacagggttttgcccaggctggtctcaaactcctaagctcaagcaacctgcccgcctcggcctccacaaaggcataagccaccacgctcagctggtttttatttctctagagtatatatctgggaatggaattgctgagccatacagtaactatctaagaatttgaagaactgccacactgtttttgaaaggggctgtactgttttacattcccaccagaaatgtatgagggctccaacttctctacgtccctgctaacactttagtgtttttcatgttaactgtgttagtggtgtgaggtgatacctcatgattttgacttgtatttccctaacactagtgatgttcagcatcatttaatgtgctttgttagccatttgtatgcttctttggagaaatttctgttcaattcctttgccccttttaaaatttgttttctggctgggcacggtggcttgtaatcccagcaatttgggaggctgagacagacagatcacttgaggccaggagttcaagaccagcctggccaacatcgtaaaagataaaaaatcagccaggcgtgatagcacacacctgtaatcccagctactcgggaggctgaggcaggagaatcgcttgaacccgggaggaagaggttgcagtcagccaagattatgccaccgcactccagcctgggtgataaagtgagactctgtttcgaaaaaaaaaaaaaaaaaggtccgggtgcagtggctcacgcctgtaatcccagcactttgggaggccaaggcaggcagatcacctcaggttgggagttcaagaccaccctgaccaacatggagaaaccctgtctctactaaaaatacaaaaaagtagccaggcatggtggcacatgcctgtaatttcaactattcaggaggccaaggcaggagaatcgcttgaacccaggaggcggagcttgcggtgagctgagatggtgccattgcaatccagcctgggcaacaagagcgaaactctctatcttaaaaaaaaaaattccattgagttgcaagagttctttatatattctgaagagaggtccttatcatatatatgatttacaaatattttctctcaataggttttccttctctttcttgatggaatattttagaatactaaactatataatattgatgagtgtcctctgaagtacaagtttaatgttgataattttttgtttgcaatgtttttgatactgcacctaagaaaacagtactaaatccagtatcatgaaacttttctgcctatacttctgggaattattgtaggtcttacatgtatgtttaggtctttgatccattgtcagctaacttttgtggggtttttaaatattttaatttttttagcttaatccccaatgtggtatctgttaacttttgtatgtggtataaagtaaaagcccaaatgcattcttttgcagtatggtatcaatttctcccagaaccatttgttgaaaacattcttttcattcttcattgaattaccctggcagccttgtagatctgttgaccatatatgtgagggcttacttctggactctcaattctattccattaatttgtatgtttatccttaagccagtgccacattgttttgattactacaattttgtagcactttatgaaatccaaaagtgtgactccttcaactgtgttcctctttttcaagactgtttggctatttggtgttctttccatttctatataaagtttatgatgagcctgtcaatttctgctatgaagccagtgctaaattaaaaaaaaaaataacatcagtggaacttgttaaagcatagtaaggcagactttattcagtaccatcacgttaggtatagggaccactgcagtaggattttgcagtggaggtgacagagtaggctaactctgaataattatagcatgagcaaatgggaatttatagtcaagttaaagagtaaaggtcagtgagtggaaaattgccaagaggaatatcaggggtatggaggatggtggataaactgacctaacatgatgtctgatcactttggcctgtaattggtagatagtagagaatcgggaacctgatcagctataagggtgatctgatactgagggtggtaggttcttattgtactgacttagcagggttcttgctaaaactcaatatacaaaagtgtacacatgggcctaagaaaagtttaaggagcttgactatagttgagtaaagcaaagactctgtcaccatctggaattttgatagggattatgtttaatctatagaccaacttggagagtactgccatcttaaaaataatgttcagtattcttggtcaggtgtggtggttcatgactacaatcccagcactttgagaagccgagatgggcagatcacttgaggtcaggagttcgagaccagcctagccaacatggtgaaaccccatatctactaaaaatacaaaaattagttgggcatggtggcacatgcctgtaatcccagctactcgggagactgaggcaggagaactgcttgaacccagaggcagaggttacagtaagccgagattgcaccagtgcattccagcttgggcaacagagtaagactccctctcaaaaataataagtattctaatccatcaacatggggtgactttccattacttttcatctttatcaacattttgtggtattcagtatggaagtctcgcacatcttttatcagatttattcccaagtagtttattattttaatactataataaatggaattgttttcttttcttttcttttcttttcttttttttttttttttttggagatgaagtttcgctcttattgcccaggctggagtgcagtggtgccatctcagctcactgcaacctccacctcctgggttcaagcgattcttctgcctcagcctcctgagtagctgggactaccggcacgcgccaccacacccagctaatttttttttttgtatttttagtagagacggggtttcaccatgttggccaggctggtctcgagctcctgacctcaggcctcccaaagtgctgggattacaggcatgagccaccacgcccagccagaattgttttcttaatttcatttttggcttgtgccgtgatagtatacataaatacaactgagttttctatgttgatcttgttacctgtaaccttgttgaacttgtttatcagttttaatagtttagtggattccttaggatttcctacataaaaaatcacatcagtagataaacttctccattccattctggattcattttcctttccttgctcacttactttttaaattccaaatggatatggaatttttcatcttccctcacaatactttcctctctctcaaatgtagtatagtaattagttgtgttgaaaacattcctgataataagccattcttgcaatcctaaagtaaaactgttcatagggcactattttttctcataactggattagttttgctagaaattttatttagaagatttgcatacagatgagttttctttaaaatatcattacctaggactaatttaatcttactaagtaccactaaatcttgtcttatcatatttgagtagatgcattcacttatttgattcttacagtaccaaatcaggcagcttattataaaattcatccacagtttacagaagatcagactgagatggccaggcgtggtggctcacgcctgtaatcccagcactttgggaggccgaggcagacagatcacgaggtcaggagatcgagaccatcctggctaacacggtgaaaccccgtctctactaaaaatacaaaaaattagccgggcacggtggcgggcgccgtagtcccagctactcaggaggctgaggcaggagaatggcgcgaacccgggaggcggagcttgcagtgagccaagatcagccactgcaccccagcctgggcaaaagagccagactctgtctcaaaaaaaaaaaaaaggaagatcagactgaggcaagagaggccatttaacttctacaaaattacgtagccagcaagaggcagagccaagacgtgtactctagcagtctgactctattctgtacttcactttgctctataaccagtacagctttaaaagtttcctcaccttttcaaatgtgttgacctctgtgaaatgctctgagatatttcttttcttttctttttttttttttttttttgagacagagtctactccatcaccaaagctggagtggcacaatttcagctcaatgcaacctccgcctcctgggttcaagtgattactgtgcctcagcctcccaagtaactggaattacaggcgtgcatcaccatgcagggctaatttttgtatttttagtggagacagggtttcaccatgttgcccaggctggtctctaactcctgaactcaaagtgatccgcttgcctcagcctcccaatgtgctgggattatagacataagccaccatacctggcctgagatatttattttcatgcccacctggctgaaattagtatatatttggaggaccaactccccttacctaaaattaatgtttcagtatttcaacccctatccttttctcttgttttctcttcattaagagaaaagtctcagccacatgtgtggctcacgcctgtaatcccatcactttgggaggccaaggcaggtggatcacgaggtcaggagatcgagaccatcctggctaacacggtgaaaccccgtctctactaaaaatacaaaaaattagccgggtgtggtggcacacgcctgtaatcccagctacttgggaagctgaggcaggagaatcgcgtgaacccaggaggtggaggctgcagtgagctgagactgtgccactgcactccagcctgggcaacagggcgagactctcaaaaaaaaaaaaaaaaaggagatataagtcccttaaggaggccaggcgcagtggctcatgcctgtaatcccagcactttgggaggctgaggcaggcagatcacaaggtcaggagatcgagaccatcctggctaagacggtgaaaccccatctctactaaaaatacaaaaaaaaacttagtcgggcgtgttggtgggtgcctgtagtcccagctactcggaaggctgaggcaggagaatggtgtgaacccgggaggcagagcttgcagtgagccgagattgcgccactgaactccagcctgggagacagaacaagactccgtctcaaaaaaaaaaaaaaaaaaaaaaaagtcccttaaggagaccacaaggatatgaaagaggcatgtgaatccaggcctacgcacagttccactacatgaatacatggaagccattccacattttgaatcaccatgcacacacacagagaaacgcgcagaatcaccatgcacacacacagagaaacgcgcacacacacacagttcctgtgcgtgcagatggtgtgacctgggagcttgagcagctggctgcacgcaggtaacaaacaaactaagagggcagaagtctaagaaagtatttcacatagccatccaaagaaactttaaggtgttccttttctctcagcccttaaaaaatgtcatttaatttgctctttgcctttatggtggtgtgtttttttgtttttttgttttttgttttttgagacagaggctcactctgtcacccaggctggagtgcagtggcgtgatctcggctcactgtaacctccacctcccaggttcaagtgattcttgtgcccagcctccccagtagctagtattatagatgtgtgccaccacgcccagctcatttttgtatttttagtagagacagggttttgccatattggccaggctggtcttgaattcctgacttcaagtgatctgcccacctcagcctccaaaagtgctgggattacagatgtgagccattggtgggtttttttgcttgttgttttgagacagggtcttgctgtcacccaggctggatgacagtgatgtaatcatagctcactgcagccttgaactccagggctcaagtgatccaccttggcctcccaaagtgctggcattacagggcatgagtaaccatgcccaggcctttatagtttctataagaaatccacagtcggccaggagtggtggctcatgcctataatcccaggccaaggcggattgattatgaggccaggagttcgagaccagcctggcgaacatagtgaaaccctgtctttactaaaaatacaaaaaattatatgggtgcggtggcaggcacctgaatcccagctactcggggggctgaggcaggagaatcgcttgaatccgggaggtggaggttgcagtgaaccgagattgtgctattgcactgcagcctggagtgtgagactccatctcagaaagaaagaaagagagaagggggggagaagaaagaaagaaacaaagagaaaagaacgaggaaagaaaaagaaagagaagaaggaagggaagaaaggaaagagaaaagaaaaaaaaaaaggaaggagaaggaagggagaaaggaaggaaggaaaaaagaaagaagagaagagagagggaaaggaggaaaggaaaggaggggaaagaagggagggaaggaaaaagaaatccacagtcaactgaactgttcttttatttatttactttgagacagggtctcaaagtactacaggcacatgcaaccacacccagctaatttttttgtaggggtgggatttttccatgttgcctagacgggtctcgaactcctgggctcaagtgatctgcctgccttaccctcccaaagtattgttgggatttataggcatgagccacgaaatgttctcttataagtaacatgttattacttcccaggctaatttcaagatgttctacttatctttagctttcacaactttaattattatatgttttggcttatatttctttggggttatgttttgggttcattaaatttcttgaatctgaatatttgtgtctttcatcaaatttgagaagtttttcatcattaccttttcaaaaacttactgcatcacacatcttcttcttcttttaggactctaatatcatgaatgttagccttttgtactgttacacagccctgtgaggctctgctgctagtatgctgaatagtttgggtttatattcagggcactttgaatattataacactctgggcctttaagtcctatggagaacgtagattttttttttttttttttggatggagtctagctctgtcgccaggctggagtgcagtggtgtgatcgtggctcactgcaacctccgcctcccgattcaaccgattctcctgcctcagcctccttagtagctgggattacaggcatgtactgccacgcccagctgatttttgtatttttagtagagacggggtttgaccatgttggccaggatggtctcgatctcttgacctcgtggtccactcgcctcggcctcccaaagtgcagggattaaaggcatgagccactgcactcagctgatttttttttttaatctggacaattacccagttgggttcagcttgcaagttttagtcaacgctctgagttgtggtttcaatgagagctttattttcaaagattttgttgtatgctttgtgtctctacctggaggctagactacacagaaggtcatctatctcacattccagctctcaaagtctatggtatgtctcattgccaccacaggattgcttggaggctggaaccaagtaaatggagaaaacaaactgaggtattaatctccctctctttctcactgagcattagaaaccacccctcccacccccttgttgatattaccagaaccagagggcttcttctggaactctccatgttggtcatgatgtgtgcctctggtttttcagccacactgagtacagaccagatgaaaccagaaggggtaaaactagtaaacttactgcctgcttggtggtactttgaacgctgatttttttttccatctccctgctgctatttacttttcagattcttcaaatagctgatgcattctgtccaggtgggacattcagtgggacagacaggataactgcatttactccacctttccctaaaccagaaccaattttgccaagtcatacacacacacacacacacacacacacacacacacacacacacataaaatataggatgcattctcttgttacttctggtttctttcacaacatcatgtttgtgagattcatccacgttagggggtttacctgtatagtaggcagaattctgagatggtgcttatgagtcctgcactctggtatgccttggtataatcccctcctgttgagtgttggtaggataaacagtttcctcctaatcaagaaaatatagcaaaagtgatgcaatgtcagtcaactgtattacattatgtggcaacaatgaaggaattttccagatacaattcaagtccctattcagtcgattacacattacacaaagcgaataatctcctagaatattcctaggagaacttgatttacttatagtatagagatatctagagatattcacctgacaaaattagatgagtcccttcaaaggggatttggatatcagtgactaaaaaatagcagacagctggatgccatggctcacacttgcactttgggaggccgaggtgggcagatcacaaggtcaggagttcgagaccagcctggccaatatggtgaaaccccatctctagataaaaatacaaaaattagctgggcatggtggcgcgtgcctatagtcccagctactcgagaggctgaggcaggagaatcgcttgaacctgggaggcggaggttgcagtgggccaagatcacgccactgcattccagccagggcaacagagcgagactccgtcacaaaaaaaaaaaaaaaaaaaatagacatactctctgttgctggcattgacaaaataagctgtaaggaattctacagccataacaaaattaattctaccaacaatctgacacagattagaagcacattcttctatattttagccccaaccctctccagatgagaaggaaactgtaagaattctgccaccatgaaaaagctgaatgttgtgacaccaccaaagggtcactctcactctacagcaatggtccctttccaaaatggaggcacagagatgacaggtggagaattcaaagcttggcctacagggaagctcagctagatccaagacaagattgaaaatcaacacaaacataaagcaatcaacaaaataagaaataaacatcttaagaagtaattaatcaaagctacaggaactgaaaacctcacttaaggaattttaaaataaaattgaaagcttcatcaacagactacaccaagcagaagaatttcagagcttgaagactggtctttcaactaacccagtcagacaaacacaaagaaaaaaatgtaaggaacaaagtccccaagaaatatgggatgatgtaaagtgatcaaatttacaaataactggcattccagggagagaaagagaaaaagtaagcaacctggaaaccatacttgagagaataatttaagaaaatttccctaattgtgctagagaggtagccatccatatgtaagaaatccagacaacacctgccagatactacataaaatgaacaccacgaagacatacagtcaccagcctaaggtcaacgctagagaaaaaagcttaaaggcagctagaggaaatggcacatcaggtacaaagggaatctcgtcatcaggctaatagcagactcctcaggagaaaccctacaagccagaaaagactgggggcctattttcatcattcttgaagaggaaactcaaaccaagaatttcaaacctgaccaaactaagcttcataagagtagaataaacatttctagagacaagcaatcactaagggatttcattaccagtagaccagccttacaataaatccttaatggagtttttgtgtgtgcgtgtggcggggggtttgtttgtttgtttttcagacatttcactcttgttgcccaggctggagtgcaatgacacgatcttggctcatggtaacctctgcctcctgggttcaagtgattctcctgcctcagcctccggagtagctgggattacaggcatgcaccaccatgcctggcttttttttttttttttttttagtggagacagggtttctccatgttggtcaggctggtcttgaactcctgacctgaggtgtccaccctcctcagcctcccaaagtgctgagattacaagcatgagccacctcacttggccccttaacggagttctaaacatgaagacgaaagaatgatacctgctaccacaaaacaaccaaacctaagtacgcagcccacagaccttttgaagcaaaaacaaaatagaaactataaaacaaccacctaacagcttcataataggatcagatcctcacatatcaatattagccttgaatgtaaatggtcttaccaccccatttaaaagggacagagtggcaatctggataaaaacgacaagtactatccttctgagacctatctcacacatatgagacacccatggactcaaaaagtgggagaaagagctatcatgcaaatgcaaaacaaaaaagagcacggatcattattcttttgttggataaaatagactttaaaccaacaacaggaaaaaaggacaaagagcactatataatgataaagggttcaatccaacaagatgacttaaccttcaacattggagcattcgcattcataaaacaagtacttctagacctacaaacagacagccaaacaagaatagtggcagacttcaacaccccactggcagtgttagatcactgaggcagaaaactaacaaattctggacttcaatttgaaacttcaccaattggacttaatagatatccacagaacattctacccatcaaccacaaaatacatattcttctcgtctgcacacagaacactcaaagaccacattctcagccataaagcaagtctcaataaattcattcaaaatttgaaaatcataccaaccatactctcagaccacagtgaaatagaaataaaaataaagatcaataccaagatctgtcaaaatcacacaattacatggaaattgaacaacttgcttctgaatgacttttgggtaaacagctaaattaaggtggaaatttaaaaattctttgaaattaatgaaggcaaaaaaacaagataccaaaatctctgggatgcagctaaagcagggttaagagaaatgtttagagtgctaaaacacctacagcaaaaacttagaaagtcagcaccatatgaagtgaaaaaaacaaaaaaggaacatacctcaaaataatagagccatctatgacatagctgcagccaacatcatactaaatgggcaaaagctggaagcaccccacttaagaactgaaaaggctgggcacagtggctcatgcctgtaatcccagcactttggaaagtcaaggtgggtggatcacctgaggtgaggagttcgagaccatcctggctaacatggtgaaacctcgtttctgctcaaagtccaaaaattagccaggtgtgccagtctgtgcctgtaatcccagttacttgggaggctgaggcaggagaatcacttgaacccaggaggcggaggttgcagtgagccaagattgcgccattgcactgcactccagcttggacaacaagagcaaaactctgtctcaaaaaaaaaaaaaaaaaaaaaaaacaactgaaaaaaggccaggcacgatggcttgtgcccgtaatcccagcactttgggacactgaggcagctggatcatgaggtcaggagttcaagactagcctggccaagatggcgaaaccctgtctctattaaaaatacaaaaattagctggacgcagtggcaggcgcctgtaatctcaactactcggaaggctgaggcaggagaatcatttgaacccgggaggcggaggttgcagtgagccgagatcgcgctattgcactccagcctgggtgatagggcaagactttgtctcaaaaaaaaaaactgaaaaaagaaaaggatgcgcactctaaccactgctattcaacatagtactaggagtcccagccagaacaatcaaagaaataaaaggcacgcaaataggactatttgtcttcactgatgatatgagtctgtacatagaaaactctataagactctgacaaaaggcccctggagctgataaacaacttcagaatttagaaaactcaattcagttctggatacaaaatcaatgtataaaaatcagcatttatttgtttgtttatttatttttaaagatacagtctcgctgttgcccaggctggagtgcagtggcacgatctcggctcactgcaacctctgcacatcagcctcccgagtatctgggattacaggcatgcagcaccatatccagataatttttatatttttagtagagacagggtttcaccatgttgcccaggctggtcttgaacccctgcctccaagtgaccagtctgcctcagcctcccaaagtgctgggattacaggcatgagccaccacaccaaatcaccatttctgtacaccaatagtgttcaagctgagagccaaatcaagatgcaatctcatttacaataaccacaaaataaaatacctaggaatacatctaaccaaggaggttaaagtttctgcaagaagaactacaaaacaacactgctgaaaaacaatggaaaaacaccccatggtcatggacaggaagaatcagtatcattaaaatggccatagtgcctaaagcaatctgcagattcaacactattcctatcaaactctcaatgtcatttttcaaagaattagaaaaaaaaactattctaaaatttatacagaactgaaaaagagcccaaatagccaaagcaatcctatgcaaaaagaacaaaaccagagacgtcaccctacctgattccaaactacactacaagcctacagtaaccaaaatagcatggtactgttacaaaaacagacacatacaccaatggatcaaggttaaaaaataaaagaagccacatacctacaaccatctgatctacaaagtagacaataacaagcaatagagaaagaattcccaactcaataaatggtactgggaataactggctagccatatgcagaagaataaaactggatccctacctttcaccatatacaaaaattcaggatggattaaagacttaaatgtaaaacctaaaactgtaacaatccttgaagaaaacttaggaaataccattctgggtatcagccttagcaaagaatctgtgaataagtccccaaaagcaactgcaataaaaacaaaaattgataagtaggacctaatttaactaaatagcttctgtacagcaaaagaaactatcaagagagttagacaacctacaaaagaaaatattttcaaattatgcatctgacaaaggtctaatatccagaatctataagaaacttaattcaacaagcaaaaaacaaatcccattaaaaaatgggcaaatggtttggcgcagtgtctcacacctgtaaccccagcactttgggaggtcaagtaaggaggataacttgagttcaggagttcgagaccagcctggccagcatggtgaaacccccatctctaccaaaaatacaaaaattagctgggcatggtggcgaacatctgtaatcccagctactcatgaggctgaggcaggagaatcgcttgaatccaagaggcggaggttgcagtgagctgagattgtgccactgcgctccagcctgggtgacacagtgagactccatgtaagccaaaaaaaaaagtggggggcagggcaaaagaacataaacaggcagttctcaaaagaagacatacatgcagccaataaacataggaaaaaatgctcattactaatcattagagaaatgcaaatcaaaaccacaatgagataccatctcaaaccagtcataatggctactatttaaaagtcaaaaaacatgttggccaggatgcagagaaaagggaacatttgtatacactgttggttggaatgtactgtggaaaggagtgtggagacttctcaaaagaacttataacaaagctaccactctaaccagcaatgccattaccgggtatatacccaaaagaaaatagatttttctatcaaatagacacatacactcatatattcatcacagcaatattcacaatggcaaagacatggaatcaacctaaatgccaatcaacagtggaatggataaagaaaacgtagtacatatacaccatggaatactacgcagccataaaaaagaacaagatcatatccactgcagcaacatggttgaagttggaggtgatcatcctaaacagattaacacaggaacagaaacctaaatactacatgttctcatttgtgagagctaagcgagtaatcatggatacaacgatgggaacaatagacactggagactactgggcgggtaggtgggaggctgggggaagaggagagagttgaaaaactacctacaggatactatgcttaccacttgggtgatggatcattcatatcacaaaccccagcaatacacaatttacccatgttacaaacatgcacatgtatgccctgaacctaaaggtgagaaaaaataatgtactacaatggaagcaaaaattaaaaatagaaactaacaaaatagaacactatagactgaactgtgtatacactcttccccgcacaatgttcatatcttcgaatcccaactcctaaggtgtttatatttgaatatgggggcttctagaggtaattagggttggatgagatcatgatgatggggctctcatgatagtattagtaccttataaagaagagacacaagagtgtttgctgtatctgtcagccaaaggtgagccagcagaatgagagataatgagaaagcagcactctacaagccaagaagatgccctcaccaaaaaccaaccatgttggcaccctgaagacatttacagcctccatagcactgagaaaattaatttctgttgcttaagccatcctgtgataatttgttatgtcaacacaacttttctacagaaatcaaaccaaaaatatactaatcaaatccatttattttgaaaggaattaacaaaactaagtaaattctagcaacattaatgtttttcataaaggagaaaaggcacaaggaaatgatatcaggaatgaaaaggggtatgcaaaaggtatgcaacagcaaaaggcacaaatacttaaaatatcagaaaatataaacattgagtataaattttaaaatacaaaactacctataaaaacaactcttgccaaaacagacttaagatgaaattggaaaataataaataaaaactttaaaaagatgaaattggaaaccttactagtgcctacaaaatataaaaataattgagtccatgctttgaattcattccaaaacatgaaaataaaatcccataacaatggcaacaaataatccagattcagctgattctgccagtgaattgtgactgataatacttgtaataagaaagtactgtatgagttaaggaaaggagaaaatactccaaccttcatacaaaaaaacaggcaatgatagactaagaaaagaatattgcttggaacaggccccaagcctggacataaacaggccatgagaaactggccataaacaagatctctgcagcactgtgacatgctcgtgatggctatgatgcacacactggaggttgctggttcaccagaataagctcaaggaacacctagcccacccagggcggaaaacttctcaaggcattcctaaaccacaaacaatggcatgagcaatctgtgccttaaggacatgttcctgctgcagataacaagcaagagcctgtcccttggttctccataaataatacattcagttaatctataaactgcagaaacgatgtttatcatgagtttactgtcaataaatagttgggtcaaactctgtttgagaccgtcagctctgaaggtctcattgcacttctgatcccacattgcactctctttttgtgtctgtgtctttattcctctagcaccgctgggttgaggtctccatgaccaagctggtctcagcaagtggcgcccaaacatggggctcgaacccgggtcgaagggtcgccagagcgatggttggagaacatggaactacgctggagcacacctgagtactcttaagcaatccccatggtaagtaagaaggggagctcggaagcatcagggtaacaatgggacaagggtcaagcaggcacaaggcttatttgagtctgcctcggcagctcctcagaaaaggaggagtgaaagttagcactagctgacttatgcagctttttagtatggtagagaaatattgcccctggtttccgactgaggaaatatggatgtagaggtctgggaggaggtaggcagcgcactgaaaaaggcgtataaggatggtgctgaggatattcctataactgtctggtcagtgtgggctctgattcattccaccttggaagcttttcacactgatgatgaggaggaaggagacaaagaagagagggagtgtgataatgttgcagaagagataaaagaacagatccgtcaaccacttaaagagacccaagaaggggaagcttgtccctgcccctcagcacctcctcaataccttgaagatagggaatggcctgaccctctggatctttcttttctggaggacactgagcaaaaagtagtctccccagcaactgttcgagcagagccccgagtgaccgccctcagttctattcaggcaggaattcagcaagctagaagagagggtaatttagaggcttggaagttccctgttaggatacaccccccagatcaacaggggaatgttatggctacatttgaggcttttccctttaaattactgaatgagtttaaacaggctatcaatcagtatggaccacgttctcctttcgtgatgggtctgtcaaaaaatgttgctacctccagtcagatgattcccattgatgggacactcttactcgagcctgtctggctcctgctcagtttttacagtttaagacctggtggccagatgaagcttctattcaagctgcctgcagtgcacaaattcaacctccaattaatgtaactaccgaccaacttttgagagttggtggctgggctgcattagacgcacaagtggtcatgcaggatgatgttatagatcagcttagaggagtgtgcattagagcttgggaaaaaaatctcttcaggtggagaacaatacccttattttagtgctgttaagcaggggccaaaagaaccctatgcagattttatagcttggttacaggagtctcttaaaaaggtgattgcagattcaactgctcaggatatagtgttgcagttattagcttttgacaatgctaatcccaagtgccaggctgctctgtgacctgttagagggaaagcacatttagttgattatatcaaggcctgtgacagtattggaggtaatctgcataaagctactctgttaatgcaagccatgggaggactgagagtgggtaaaggaaatgctccatttcctgaagcttgtttcaactgcaggaaacatgggcatacgagagagaatgtagaaaaaatcagagggtccaactacccattgatggaaaaaagaaaactgctgaaccaggtctatacctgaagtgtaaaaaaggaaagcactgggccaatcagtgtcattctaaatttgataaagacggaaacccgatttcgagaaacgccatgaggggccaatcctgagccacattccaaaccagggcattcctggctcagaccactccctcacccctgtataatgcttgtcccccgccacagctggtagtgcctcagtagatctgtgttgcaccagggctgtgagtctcctgcctggaaagccactgcagaaggtaccaacaggagtctgcggacctctgccagcaggaatggtaggactacttctgggaagatctagtttaaatttaaaaggagtgcaggttcatacaggagtaattgatttggattgtaacggggaaattcaaatcgttatatctacctctgttccttaaaaggcagaaccgggagagcgtatagggcagcttctgattttaccgtatgtgggactaggaaaaagtgaaactaaaagaacaaggggatttggcagtacaaataaacaagggagagccacctactgggtaaatcaaattactgataaccatcctacctgtgaaaaaactattcagcgaaagaaatttaaaggtttggtagatacaggagtggacatttcaatcatatctctacatcactggccgtctgcatggccaattcagcctgctcaatttaacatagttggagttgataaagcccctgaagtatatcaaagtagttatactttgcattgtaaagggcccgatggacaacctgggactattcaaccaattataacttctatacctataaatttatgggggctctccccccatacatttattacaacaatggggagcacaagttctaattcctgagcaattatacagccctcaaagtcaacatatgatgcatgaaatggggtatgtccatggtatggaactaggaaaaaatttgcaaggtttgaaggaatctcttcaagcggaaagacaaagttcccgccaagacttaggataccatttttgatggtaagcctgcagagcctatcctgttaaaatggctgacagacaggccaatatggatagaacagtggccgctgagtaaagagaaactggaggctttaaatgaactagtcaaagaacagcttcaaaaggaacatatagctcaaactctctccccttggaattccccagttttcgtaattaagacaaaaccaggtaaatggagaatgttaactgacttaagggctattaattcagctatataacctattggggcattacagccaggactgccttctcctgctatgattccaaaaaattggcctttaatagccatagatttaaaagacttgtttctttactatccccttagctcagcaggactgtgaacagtttgcaattacgattcctgtggtaaacaacttgcaggctgctaagcgttttaattggaaagtgttgcacaaggcatgttaaacagtccaacaatttgccagacttatgtagggcaagcaattgaacctactcataaaagattttcacagtgttacattattcatcatatggatgatattctttgtgcttcccccactccggaaatattactccaatgttacggtcacttggagaattcaatttctcatgccagtttaattatagctcctgacgcaattcagactactactccttacgtctacttgggggccttagtaaatgtcaccacaataatgccacagaaagtagccatatgtaggatcaatagaaaacattgaatcagactttcaaaatttactagggtatattaattggataccgcctgctctaggcattctgacttatgccatgagtactctgttttctatctttagaggagatcctagtgtcacaagcccttggcaattaacaaaagaagctgaggcagagctgcagctaattgaaaagcaagtccataaggcccaaataaatagaatagatctagagaatactctagatttgctcatttttccaactcagcattcacctactggtgttattgttcaagagcgagatcttgtggcgtagcttttccttccatatactaattcacggactttgactccttatttggatcgaattgctactatgataggaaatgggagaactcggattgttaaattacacggatatgatcctggaaaaattattatccctctcacaaagacacaaatacagcaagcttttataaatagtcttacttgttaaacccatttagctgactttgtgggtattctcaataaccattttcctaacatgaaactgtttcaattttttgaaattaactaattggattctccctaaaatgactaaatcaaaccaattgaaggtactgagaatgtcttcgcagatgggtctagtaatggtaaagcctcttattctggattgaaaggtaaagtttttcagacgccctatacttcagctcaaaaagcggagcttgaggctgtaattgaggcattgactgcttttaatatgcctattaatatgatttctgattcttcatatgtggttctacacagttagttgaaaatgctcagctacaattccacacataagagcaactgatgactttatttacccaattgcaaacagcagttaggagtagaatgcaccctttttacatcactcacattagggctcatacacctcttccaggacctttgactgtagggaatcaaatggctgatcacctagttgctactgcaatatctaatgctagacaattccacaatttaacacacgttaatgtctctggtctcagacacagatacagcattacctggaaagaagctaaagctattaaccagcgatgcccaacttgccaaatgattccttgaggattggaacctaattctctttggcaaatggatgtcacacatgttccctcgtttgggagactagcttatgtacatgtatgtgtagacaccttttctcactttgtctgggctacatgccaatcaggagagtcttctgcctgtgttaaacatcaccttttgcagtgttttgtggtgatgggcattccagcttctattaaaacagataatgccccaagctatactagccaagctctagctacatttttctctatatggaatattgaagacattactggtatcccatataattctcaaggacaagctatagtggaaagaatgaatctctccctaaaacagcagttgcaaaaacagaaagggggagacagtgactataggactccacacatgcaactaaatctagcattattaactttaaattttttgagcctgcctaaaggccgattgttatcagcagctgaaaaacatttacagaagacagctgcaaaggcagaagtggaacaatgggtttggtggaaaggacccaataacaaaagattgggaaacaggtaaaataataacatggggcagaggttatgcttgtgtttctaaaggactgaatcaacagccaatttgggtgccattgagacatctaaagccctactatgttggggtgatcagactgaacactaggccatgggggctacgaagtatggcagagtcaaaggaatgagacaagttaagagttcatagggtgggtccagggggccaacactagtatggaggctgcgaagtccctgagctctgggagcccacactatttattggtgatcaaagaagcaggtggtgaggacgtgtggacatgggggtagacaggtgaggatgtgggggtagaaaggtagctgtgatggtttagcatatgctctgctacttgagataatggagaataggttcttctaactcaagatacaatcaatttatgagccacaaggggttttatgccctgggcttagactgtagtgcagcggggcagccttccatccttaggcacagagcttggtgttccataggccacaaggggttttagacccgggacccaggacatgttccaagactcttttacattatgtcagacaagcaggccctgcctcagcccttctaccgacacagaaagtggaacaacgggtttggtggaaagacccgataacaaaaggttgtgaaacaggtaaaataataacatggggcagaggttatgcttgtgtttctccaggacagaatcaacagccaatttgggtgccatcgagatatctaaagccctactatgagccagataacgaggaagaggttttgggaggatcccaaacacccactggtggcagcattgtccaagttgatgctgaggatgacccccaactgtcacgagcaacactcatcgaaagcagccacctacctggggacagatcaagaagctgtcacagatggtggaagaaaacctgaggaaagcaggacaagcagtcacagtgagtaattttatgacagcggtgatcaccattgccatgagtattccttcagcaaggactgacaaaaagagcaattatactcattgggcatatttaccttttccaccacttctatggcctgtaacttggctggaccccccagtggaggtatacactaataatagctcttggatgcctggtcctacagatgatagaggcccatctcacccacacagggaaggaactgttatgagtatttctttaggatttaagcatccgcccatctgtttgggaaaggccactagttgcccaccccctcagtatcaatcttggctggcaataatgcctggacgtaatcactctatggcagttacacatgctttctggtgtcagtatttaccataatgaatctgctcctctaattgaggcataccgccctcaaaaacctatttgtaaacaggattggacccggtcagaaaaaatgaatgtactcatttgggaagattgcattgcaggacaggcagaggtgctgcatgattcctatggaatcattattgattggtcccctaaggggatgtttagcatgaattgcacctctgtctgcatgtgatggccacactatgttcagctggtctgaataaaacgatcagatggtaaaaatgataagaagtaccgcaagagttcctattatctggaaacatgacggtatagtggcacctcaacctcaaatgatatggcccgctgtaggagctaaacataaggatttgtggaaactattaatagcttttgataagatcaagatttgggaaggaaaatatactatgccatcacaatataatcctaattacattttagaacttgttgaaaataatacaatttggatacaaagttgtgttcaccctccttttgttggtaatgggcgatctaaagtttgacacccctaattatcatgtaacttgccaggaaggtagattgtcctcttgtgtgaactcttccttgtttaatactaatcattctatactagcagtgagagctcaagaaggagttggttaccggcgaagctttcccatccttgggaaccctctccctctgtacatattattactaaattcttcagaaaattctaagaagttctcagtgtttcattgctactttaatcttgattattatgggactgattgctgtcacagctactgctgcagtagctggagtggcactacattcatcagtgcagacagcagattttgtaaataatggcaaaagaattctactctgctgtggaactctcaaactaaaatagaccaaaagatagttaatcaaatcaatgatctccaaccaactgtaatgtgggtgggagatcaagtagctagtttggaatatggaatgcagctgaaatgcgactggaatacttctgacttttgtatcactcctcacccttataatgaattagaccatgaatgggaaagaataaaaaaaagtatctggaaggacactctacaaacttgtcttcggatgttgcaaaattaagagaacaaatatttcaagcatcccaggcacacctgaccttaatgccaggaactggagtgcttgaaggagttgcagatggattggcagccataaatcctatgaaatgcataaaaacacttggaggctctgtgatttctatgatggttgtgctattaatctgtgttgtttgtctttgtgtagtctgcagatgcggatcctgactcctgcaagaagtagctcactgtgataaagccgcctttgcttttattgccctggtaaaacaaaaagggggacatgctgggaataggccccaagcctggccataaacaagccataagaaaagtcataaacaagatctctgcagcactgtgacatgctcgtgatggttatgatgcacacactggaggttgctggttcaccagaatgagggcaaggaacacctggcccacccagggcggaaaactgctcaaggtgttcctaaaccacaaacaatggcataagcaatctgtgccttaatgacatgctcctgctgcagataacaagccagagcctgtccctttgttctccttaaagaatactttcagttaatctacaaactacagaaacgatgtttatcacaggctgtcaataaataggtgggtcaaactctgttcgaggctctcagctctgaaggctgttagccccctgatcccactttgcactctatttctgtctatgtctttattcctctagtgctgctggattgtggtctccatgaccgacctggtcttggcaaatattacatgccaatgttaataatatttttaaaaaatctttacactataggtatataaaatattctagcaaaaaaaaaagttaatccattatactcaaactgcatttttctggaattacaaagataatataacattggaatgtcaatcagttatctttccacattttaaaaaaacttttatttacttacacatttaaatattaggtatctatcaagggcaagtacagtcagtcctaggtacctgaattttctgagtaaggcaagatcatcaaagaggaatcagggaaaagcattcaataaattcttaagccattcatgggaaagattccctaagcaatgaaaagtagaaaaaaaccttgaccttttaaaaatctacagcaaccaatacagtgattagtaatgatggaaaacatctgccattaggattagaaataaaagtatgcttgttttactacttctagttattattctagtattttctgcctagacaagacataaatgactgaaggttacaagttaagtcagttacagataatatgaaatgtggaaaacccaaaatacataaaactaggatgttaaagaatgttgaacaaggcttctagtaaaattcagtatacaaagatcaagtgattttatataaacaatcagaaatcagcttctaaaaaaaataaaaaaggaaatcagcttctgaagctaggcaatttctaggctgtgagactagggtatcatttcttagtgatacatcactattagtccaagcaccaggatgaggccaacctacagtattgacctcacctgtgacccacaagtgctcatactccaacaactgtgaaaaagtttcaggaataacctataggttttatttgagacaatcaggatggcatctaaggacagtctgtgaggtgacagaagtcacacaaggcaattaagactaatctgcgtcttttgtgtcactggtaacagttaaacgcaacaaagatgggttaaaataatcacactcataccacaagagaaccactctgaaaccctttcctctccataagaaaacatgtaacatgaaaatgcatggacctcaattcagtttttttggttttgttttgtttttgagacaaggcctctgtcacccaggttggagtccaatggcacgatctgagctcactgcagccatgacctccctggggtcagtgagacacctatctcagcctcctgagtaggttggactacaggcacgtgccatcacaccaggctaatctttacattttttgtagagatagggttttgccatgttgcccgggctggtcttgaactcctgagcccaagtgatccgcctgacttggcctcccgaagtgctgggattacaggcataagctattacacccagctgattcaggattggtaaacttacctgaagctttggattaccattacactggctggattaagaaccacagaaagaatcaccaagaaacaacagccttaattgctgtacatgatataacagaaatatttaaatttgtaccactcagactggaacctggttatgcagcttgtgcgtgtgtgtgtattccagggccatgttcaggaagtgctagtgatggtgtcaagcacagcagaatatcatgatcatccatgttcacaggagtttttctgttttcatagcacatgggcaaaatgaaaccccagaaataggtcatactgccaatcatagcagttaactgagtcaggcatatatgactgctttgccaaacagtggcatcaaagacaacattcgtggttcccaccacctctctgcactgcctgatagtacaagagttcccacctctccaggtgaagggttatgggtgtccctccacggccatgaaatcacggtatcttaagttactatctgttagtgcaccctttctccactcagacccttcttcaaccctgaccatttatctgaaaagatcaggtttgaaaagaggaacaagagtatttttacattttaaagctgtattataacttttaccttggccagtgtgagccactacaggtggaccatgtctaaaaatatgacaaaccaaaaagagaatctacactgttaaaacaggattgtctgaatcctgaaggcccactttaggtcagttgtaacccagaggatgtatagcaactagagtggtgttgctataggagaaagacataccatgccaggaatgagcagcggggtgtaagaaacttccaaaatagttctatagaaccacccagaaagccaggctttgacaggtttcagagaagcaatcctgatattccatacatgcccagtttctcataagtgtgaatgcccctcatattcactaaaggacgaagaatataaaaaattactttccaacatttattaccttcatgaagtttttctccactataaaattacaggtaaacaccaaagtatttggcaagaataaaacttctgaacatatcttacatcaaacatcttacataaaaagggtttatctccattccaagaacccaaggaaacagtgaaagctattgattttttttttttttttttttgagatggagtctcgctcagtcgccaggctggagtgcagtggcatgatcttggctaactgtaacctctgcctccctggttgaagcgactctcctgcctcaggctcttgagtagctgggattacaggggtgtaccaccatgcccagctaatttttgtatttttagtagagacagggtttcaccatgttggcctggatggcctggatagtctcgatctcttgacctcgtgatccacctgcctcagccttccaaagtgctgagattataggcatgagccactgcgcctggccagctctctatgtttctaacattgtacagcttcaggatgaactcttacacagtgtattgtcagcagattccaacggttctcccacatgcctttaactttatggagcatcatcagagtgtaagttctttcctatctttgaagtgaacagggacaaatgagcactttgacacagtgcttacattgttttctcaccagtgtgaattacaatgtgactattaaggcatatggacttccaaaaggattttcctcattccttacataaaatgggtttcttggccaggcgcgatggctcacacctgtaattctaccactttgggaggccaaggcgggcagattacctgaggtcaggacttcaagaccagcttggccaaaatgttgaaaccccgtctctactaaaaatacaaaaaatcagccaggtgcagtggtgtgtgcctataatcccagctactcgggaggctgaggcaggagaatcgcttgaacccaggaggcggaggttgcagtgagccgagatcatgctactgcactccagcctgggctacagagtgggacttcatctcaaaaacaaacaaacaaaaaaacatggtttctctccatggtgtttctacacgttcagtaagatgagaagaatgccaggtgcagtggcacacacctgtaatcccagcattttgggaggtggaagcacatgatcacatgaggtcaggagtttgagactagcttggccaacatggtgaaattctgtctctaccaaaaatataaaaaattagccaggtgtggtggtgcatgcctgtaatcccagctactcaggagactaaagcaggagaattgcttgaacttgggaggcagaggttgcagtgagccaagatcatgccactgcactccagcctaggtgacagagtgagactcatcaaaaaaaaaaaaagagagagagaagaactagtgttttcctacatcccttacatttacagggtttctctacagtgtgagtttgtacatatctagaaagattcaactgttcaggctttctcacattccttacattgatagtgttactttctcctgtgaatttttacatgttcagttaggcttgaggaaacagcaaaggtttttccacattcttcacatccacagggcttctctctagtgtgttttcaaatgtgcaatacgagctgagaaagaagcaaaggctttcccacactggtcacattcaaagggtttctctcccatatgagttcttaaatgttgaatacgtcctgaggatgtacggaaggccttcccacattccttacatttatagggcttctctccagtgtgaattcgcacatgattagtaagatctgaatgacaagtgaaggctttcccacagtccttacatttatagggttttattttggtgagagtttttaagcgatcatgaaagcacatggaatttcgaaaggaatttccacatgcgttacattcagaggtcttctctgctgcatgagtttttaagtgttgagttagtacacaagacctactgtaagctttttcacatgcattacatttatagggtttatatccagtgtgagttcttaaatgatcaactagactggaggagacaacaaaggctttcccacagtccttatattcatagggcttatctccagtgtgtcttcgtaaatgtttagtaagatctgagcgttctgtgaaggcttttccacatttcttacattcatatggcttctctccactgtgtcttcgtaaatgtttagtaaggtatgagcgctcagtgaaggctttcccacatttcatacattcatagggtttctctccagcgtgtgttcgtaaatgtttggtaagatatgagcacttagtgaaagctttaccacatttcttacattgatagagtctctcttctgtgtgagttcgcatgtgaatacgaagacaggcagaagaggtaaatggtttcccacatttgtaacacttaaagggcttctcaccagtgtgagttctcaaatgagcaaaaagagatgagaaagaaacaaagactttcccacactggtcacaatcaaagcgtttctgtcctgtgttacttcttctatcttcaataacacctgaggatgtaccaaaggccttcccatattccttatgctcatatggcttctctccattatgaactctcaaatgtccaaaaagagatgggtaagaaataaaggctttcccacagtggtcacatttaaaggttttctctctggcgtgacatcttatatgttcaataaggcctgcagatgtaccaaaggctttaccacattccttacacccatagggcttctctccagtgtgagttcgtacatgttcaagaaagcctgacggcacagtgaaggttttgccacagtgcttacatttataaggttttatcccaatgtgggtttgcatgtgattattaaggtgggtagggtatctaaaatcttttccacattccttacattcataggggtttttaataatgtgtgtttcaacatttacagcatggcttgtggagtgagtaaatgcttccccacattgcttccattcattgagtttttctccactctgagttttcctgtgtgcttcaaggtatgactgataaatgaaggctttcccatagtcagtgccttcaaaggatttatcttgtgtacactttctctggacctgaacatttaaaatcaggcggaaagattttccatgcttactgaacacagaaactttccttatggtagaggttttattgtatagagaaaggaggtcttttgcatactgaatacattcagacgtgttgcctctattttgagtactcatgttggtcttaaggcatggatgtttacagaagacatcttcacattgcttacagtcatagagttcctctccattttggtttcttgcctgttaacacaggaatgaacaataaaggaagcattttagcagacttattaatagataccactcttctaagaaacatgataattattatttttgccacttttataacatgcatatagtttctaccttttggatttccttcaacttgaataatggaaccctactgtaagaatcctatgtcatctgctctaatcttggcaagattcctgtagcttttcatgaagttattttaaaaactcaaatgtctagttatacatgttggaatgaacattcatgggaagtcttaagtaccaagcttcacacaaggtatgggatctctctccagatatttctccccttgggtgaattgggtgaatgccacttctctcaaatatctatcatttctgctgatttcttttttttttttttttttttgagatggggttacgctctgttgcccaggctgtagtgtgcagtggcacgatctcagctcactgcaacctccacctcctgggttcaaacaattcttctgcctcagcctcacaagtagctgggactacaggtacacaccactatgcccagctaatttttgtatttttagtagagatggggtttcaccatattggccaggctggtctcgaactcctgacctcatgatccgcctgcctcagcctcccaaagtgctgggattagaggcatgagccaccgtgcctggccatttctgctgatttctataatgcaataccagtcttctctgaatgtgaaaaataagaaagttcttttgttaatcttaccaactgtatcccatttaatgtttttaaacaaaaattatcttgccaaagggctggccctttggttttcaggcacattttccattctgaaataaaagagaaaaatatacatgagagtttacacatgaaatggtaggttaaataaaaagcagatagatttgaacaatttatatatgtctaaaatttggcaatcatatggggtcaagttttagtaatttttaaaacaacttattctatgaaaattaaacatgatggttaacagaagcaatactaccagggaaggaaaagtcggaaaaattggaacaaaagcatacaataaatccataaacataaagaaggtcatttgttaggtaatagggaagtctggatagatgcaaagcaatggaggatgaaaagttaagatatcccaaaacatccaagtccagtggacagccttctgattcaaagggcatcttataaaacttcattgtgcttccaaacgtactgagaacttctcatggaccagggttgttcttcacaaacactcaccttggagaactcttggcagtgtgctcaactcttcctcttcctccagccaagagatcagactgggtttgaagagctggtaacctgtacacagggaaagatacaccaatggaagaggctcatgcaagaaatggcaaacttttccatgaaacagggactacgtttctaattaaagcagtgaaaagcacttaaattgcatatatcccatctttctgttctctgaagacactggttatctctgacctctgaaattcacattcaagcttaactcatttcctgtttgccccaagaaacaagcactagcagtgagctgcactttttctttctaaatggcaaatgttaaatacaaattctaaaaaccactaaaacctttattaaaatagaaactaatggaagctcaaagagagatcttgattctcctgggaaaactcccattccagtagttctgaactttagagtgaattactcatctgaatacagggccccaacagcagactttttgatttagtacatcgagtctgagaatgtacacatatctaagacagtgatggtgatgctactgacgcaaactaccatacaagattaaaacccattagtacaggaactgtctctgttatttcctattttactcattaaaaaaaattttttttcagtgtgtatatatcccactgtattcagatttgacatcactaatcctagaatacagtaagtacataatttgtatcttgttccagaataggctacaagggatgatgccagacttacctactgaggacaggttcttgtagttctccagcatcacatcactgtacaggtttctctgagctgggtccagtaaagtccactcttcctgggtgaactccacagccacactgtcaaaggttaccaggtcctaaaccatcagacacatgctgatttgagccaagcaacatctccaccaatgttggctgaagaatgaggaagggggacccaatccctgtacagggtactgagtgctcccactatctacaccccaaggttcagtggccctaggaactcttctatccacattcactcactgtcaatttcctccaataacatggctgtaacagaacctcttacacagaaacttatcaaccacaactagaccgggagctcatctcatttgattcctctctactgcaaaacactcctgagcacataacaaatacttgataaatgaggatatggataaattccttaagaaaagaacactttcataccccttaccatctgtcctagcacccagaaaaataaatatgcagttggcaccaggaaaatgaacactaattcataaatacaaaaatactgagataatttccagggtaattcctcaccaatatgagaggtatgactttctgggaaaaattcaactagggtctatatttgctttaaggaagaatacagacaggagtacctacaagaaaatgagtctttgttgatatcattactccaattttagaaggatacaactttcacactaagtttagatctccccaaattcatcattatcagagcatctctccagagacattgctccctcttgagtgaatgctattcctctcaattatcttttgtgcttattttctatattggaagtcccaatattctctgagtgtgaaaaataagaaataccctttcttaacattaccatttgtatcccattagaagtttgtattttccaaaactcctgctgcagtgctgaaacactggtttgatgttttattgcccagtctgaaacaaaaacataaactgaggttttttttttttttaaaaaaaaaggtaaaatgaaagagttaaaaattataggcctcattcatatttgtttttaaaataaacataagaaaaaagaaagctaaattgaacatttagactgtgtcaaaaaattggcaataatgagattaaagggtcaaaattttagctaatttgctacaaattgactcatttagatttaaaactaatgttaaacagaaagaatgttatcagaaaagtaggaaagatctgggccaaagccatatttcaaagcaaagaacttgaaaaacaaaatatatagtttcataagatcatagaaagttggagtagatggaaatttaaagagtatcaaaaattgaatattttctaacttctgagataaatggccttaaccttgtgagagaaggtgcatcttaaaaagttccctcagagggctgggtgtggtggcttacgcctgtaatcccagcactttgggaggctgaggtgggcggatcacaaggttaggagatgaagaccatcctggctaacacggtggaacaccatctctactaaaaatacaaaaaattagccgggcatgttggcaggcacctgtagtcccagctactcgggaggctgaggcaggagaatggcatgaacctgggaggcataggttgcggtgagccaagatcgtgccactgcactccagcctgggggacagagtgagactccgtctcaaaaaaaaaaaaaaaagttccctcattatgtttctgatggtttggatgttagttccctccaaatctcatatggaaatgcaacgccaaatactggaggtggggcctggtgggagatgtttggatcatgggggtgggtccttcatgaatggcttagtgacatactcggagtaataagtgagttcttgttctgaattcatgtgagacctggtagtttaaaacaggagtctccaactccggagccatggaccagaaccaggccacagcacaggaggtgagtggcaggagagcaagtgaagcttcatttgtatttatagctgctctccatcctaattgcctcctgagctccgcctcttgtcagatcagcggcagcacttgattctcataaaagagcaaaatctatcatgaactgtgcatgcgaaggatttagtttgcgcgctccttttgagaatctaatgcctgatgatctgtcactgtctcccatcacccccagatccccaaatgggaccatctggttacaggaaaacaacctcagggttcccattgattctacattatggtagaattgtataattatttcattacagtagagttatggtagagttgtataattatttccttatatattacaatgtaataatagtagaaataaagtgcacaataaatgtaatgcacctgaatcatcctgaaacaatatccctgagacctggtctgtggaaaaattgtcttccatgaaactggtccctgatgccaaaaaggctggggactgctggtttaaaacactatgacaccacccccaacttctcttttactccctttctcatcatgtaatttgtctgctcctcctttgccttctgccatgattgtaaggtttctgaggctctcacctgaagcagatgtcagaaccatgctttctgtagagcctgcagaatcgtgagccaaaataaacctattttcttaataaatcacccagtctcaggtatttctttcttgcaacacaagaacagactaacacagcttctaaacatactgaacttctcactgaccaaggttgttcttcacaaatactcaccttggagaactccttgctgcaaggttctcaactcttcttcttccaaccaagagatgacactgggtttaaagagctgaaatcctttacatgaagaaatgatacattaatggaagaggctcaggccaggcacagtggctcatgcctgtaatcccagcactttgggaggctgaagtgggtggattacctgaagtcaggagttcaagatcagcctaagatggtgaaacccccgtctctactaaaaatacaaaaattagctgggtgtgatggcgtgtgcctataatcccagctacttggggggctgagacagaagaattgcttgaacccaggaggcagaggttgcagtgagccgagatcatgccactgcactccatcctggacaacaagagcaaaattccatctcaaaaaaaaaaaaataatggaagaggctcatgcaagagatgataaactttacattatagaactatagttcttagagaaagcagtgaaattatttcaaatggactaaaactgaaaatatctcttatttctgtgcaccccaaaattggctctctgacctctgaaatgcaaattcatgcttatgtgcacatttacaaagcaataaccttttagtcacagaaataaggtatgttgtcaaactcctgaatgaagaaaaaaaagaaaaaaagtgaaacaaagagacccttgtatacttggagaatacaactacaccagtgattcttaatattatagtgcatcaaattgatgtggaaggatagttaacacacagatgacaatccaagtggagagtttctgattcagtaggtcaaaggcagagactaagactgtacatttctaagggagtaacagtgatgctgtcgaaactggaccacactttgaaaacgaccacagtaattaagacctattatggcagggacaacgtctctggtgaattcagtgttgaacaaaccaattctggaacacagcaagtacacaatgtatatctcttccctaagaggctgcataaaatgatggcagtcttacctactttggccacgttctcataattctccagcatcacatctctgtataagtttctctgaactgggtccagtaaaatccactcctcctgggtgaagtccacagctgtatcctcaaaggtcacggagtactaaaccatcacatacatgttgatttgagccaagtaacagattaaccagtgttcactgaagaatcagttaacagaccccaatgcctataaagagttgtgaggtctctcattatctacccaaagcttaataatcccaggtaaatctcaggtattcctctctctatccttgctctttcactacttaacaattccagttgtatggctttaatggcacatctcaatcatgaacttctcatcacaagcagactgtgagtgctttctcaacttatttccctctactaaaagatatcccagagtacactgcatcatatacttgataaacagcgatgaatgattagcctttttttttgggaagcagggtcttgctctgtcacgtaggctggactgcagtggtgtgatcatggctcactgcagccttgacttactgggctcaagtgatcgtcctgcctcagcctcctgagtagctaggactacagccatgcaccaccatgcctggcattttttttttttttttttttttttgtggagacaatgtctcagtatgttgcccaggctggtctcaaattcctaagatcaagcgataatgccactcacttctcagcctcccaaagtgctgagattacaagtgtgagccactgcacctggccaggattagcctttgagtaaaggatgctttcatcttcctttccatctgccagaccactcagcaaaataagaaatatatatctggcaccataagggacaaaattaattaacaattactgaaatgctgaaatgcttttcaaggattatcagtatgagaacctccactccctggggaaattcaacaagtgactcagtgcttgagtgagtctttatttacttaaagaagctctggagacacatctgcctagaaggaaatgtgtttacctggtgatgcaagtatgtcattttgtggaagtatacattttctgcatacctgataacaatttgtcaggcagtaagccatcttcctttctgcctctgtcttttcttcatgaaggcagattgggttcctagaaagacctggaaaagaaagaaggcataagagcccagacataatcacagttccaacattcgcatgcatggaagttattccaacctggttcgaaattctcttataattcatataaactcacataaatatacattacatccataaaatgccactgcacttctgtctaacctagagcaagaaaaaggaattgtgggccaagctgtcgtaagtaaaagtataatatcctcattgcacaggtaaagaaacttttttttttttttttggagatggagtttcactctgttgcccaggctggagtgcagtggcacgatctcggctcactgcaagctctgcctcctgggttcacgccattctcctgcctcagcctcctaagtagctgggactacaggcacctgccaccacgcccggctaattttttgtagttttagtagagatggggtttcaccgtgttacccaggatgttctccatctcctgacctcatgatccgcccaacttggcctcccaaagtgctgggattacaggcatgagccactgcacctagccaggtaaagaaacttaagacctgaggaatgtaagtctttttgtgcccatggtgatataactcacaaatgagattatgcagcacctcttctcaaagaacacacttaagggggctaacttacacaacaggcctctctggcacacttcaacaactcagaaaggaactactagtgtgaatactaaggcctagagccctggactatatattctgcatggggtactgatatggtgtggctctgtgtccccacccaaatctcatcttgaattgtgataatccccacatgtcaagggcagaaccagatggaggtgattggatcatgggggcagcttcccccatgctgttttcgtgataatgagtgagtctcacaagatctgatggtgggtttttttttgtttgtttttgtttttgaaacagagtcttgctctgtcacccaggctggagtgcaatggcgagatcttggctcactgcaacctctgcctcccgggttcaagcaattctcttgcctcagcctcctgagtagctgggattacaggcacgtgccaccagacctggctaacttttgtatttttagtagagacagggttccaccagttggtcaggctggtctcgaactcctgaccttgtgatccacctgccttggcctcccaaagtgctgggattacagatgtgagccaccgcgcccggccaatctgatggttttataagtatgtggcatttccccggcttgcacccaatctctctcctgccaccctgtgaagaggtgtcttctgccattgatgccaccctgtgaagaggtgccttctgccattgatgttaagtttcctgaggcctccccagtcatgtggaactgtgagttaattaaacctcttttctttataattatccagtcttatgtattttttcatagcagtgagaacagactaatatggttacctaaagcagatttttggaaaaacttaccatagggcaaatcctgtgaggctgacagtgaaatatgtctggacacagttttttgtgattccaaggacatatcagggtagcttataaatctaagtggataactggcaatctattcctctttatatagagtatctggactcatgtagacatcaatcattaatcaacaagcgttacttatcagtcatcaaataccatatattaaatctttactgctggtgatatgtgtaaaacccactagaaatagtatatgttctgtataaaatgagtattaataacaccaactgccatttactagggactgttatatgttagacattacatatatatacacatacatatgtgcatatacatatatacatatatatatgctcacttatctgaacaatatccctatttagtgctgaaaaaaatctaaattcagaaaacacaaatgactcttctaatatcatctacttaggaagcggtgaaccaggacttgaatgcagtcaagtttgtccctaagtctaatcctctgtggttgttattactcccccataatgactgccatataaaggactctgggaattgatacctggcttacttaaaatgtgctattctacttttgactataaagaattagaacaagaatgtcatcctttacaaacaagtcagaactcatttccaactctggttgcttcaacagggttccaagtagaacactgaagttagcgttcagagttctgcccattgctcctgcaagaggacaaaaaacatgcagagcagcaatcgcaaatcagactctgccccttatattgactatttgatgggtcttctcagaaaatcaccttttattattattcatgagttctctttttcctaaaatttctgcttgtatttttatcccttccttcctttatggttcttacaaatcaaatgaaaaacgcaattgagatcatcaacagtagagaaggaaaagaaaaaaatctttgaacttgaaaacagactacttagaaatacacaaaggagaaaaaacaaaaatgaagaaaaattacaagattcaagggacatcatcaaaagagcaaatttttgagttacaggagtacaagaagacaagaaagaaagagaacacatacttaaagaaacaataacaacatttccacactgaggaaaatatataaatatccatactcaggaagggcaaacatctccaatcacattcaatccaaacaaggctaccctaagatataatataatcaaacagtcaaaaatgaaaagcaaagtgaagatcttggaagcagcatgaaaaaagatgcaaatcacatatgaacgagttccaataaggttatgagcagacctgtcaccaaagaccttacaggccaggagagaatgggatgacatatataaactgctgtcaggaaaaacaaacaaacaaaaaaactgctcacaaagaataccatacccagcaaagctgtccttcaggaatgaaaaagagatgaagattttcaaagaaaaacaaaagcagaggtagttcatcgacaccagacctaataagaaatgctaaagggagttctcaagcttaaaaaaaggacactaattagtaacaagaaaacaaagcacaaaactcaggtaaaaataagcacgtagctaattcagaatactcaaacactgtaatggtggtttataaatgaattatatccttacgatgaaggttaagagataaaagtattaggaacagtaagagctaaaataattaagggatatacaatataaaaatatgtaaattacaatatcagaaaaataaaatgaggagaggttgagttaaagtatagttattttatgtgatcacagttatcggcttaaaatatcctgctataagatgtttcatataagtcttatggtaaccacaaagcaaaaatgtatagccaacacacaaaagataaaaagtaaagaatcaaaagtacactagagaaaattattaatcacaaaaatagacaaaggaagaaacaaagaatataaaaaaaaaccccacaaaacttaacgagccaggtgcagtgcctcatgccactaatccctgcactttgggaggtggaggcaggtggatcacttgaggccagaagttcaagactagccatggccaacatggcgaaaccttgcctctactaaaaatacaaaaattagccaggcatggtgacgggcacctgtaatcccagctattcaggaggctgaggcaggagaatcacttgaatgggcaggagaatcgcttgaacccagcagatgaagattgcagtgagccaagatcatgccactatactccagcctgggattttttttttccaaaatggaaaaaaaaaaagaaagaaaactattaacaaaatggcagtagtaagtacctacctacaatgattactctgaatgcacacacactaaattctccaattcaaagacagaatggccaagtggattaaaaaaacaaacaaagacacaaatgatcatgttgtttacaagagactcacttcatccttaaggacatacataaattaaaaacaaaagggcaggggaaaaaacactccacacagatagaaaccaaaagacagctaagttaagtattacttatatcagacaaagtgaactttaagtcaaaaaccgtaacaggacacaaaggtcgttatatgataataaaggaatctaccaatcaataagatagaataattataaatatacaattggccatctgaattcatgagtaccacatctccacttattagggtagattcaacctgccatggattgaaaatatccagaaaaaaaaaatgcatgggtccaactttattatatatgtgcacatattttccctgctcattattccccaaataatacagcaaaacaactatttacatagcatttactttaagttttacagtaatctaaagatattttaaagtacatgagaggatgtgcatgattttcaaacaaatacaacatcattttataagagacttgaacatgcctaaattttggtatccacaggtgggggaggggttataggaaggggggttatcctgaaacaaatcccccacagattccaaaggatgactacatatgccaacaacaacagagcacgtaaacatataaagcaaattaataatagatctgaagacagagatagattgcaataaaataatgggagactttaataccctactttgaacaacggacagatcattcagacagaaaatcaataaagaaacatgagactagaactacactttagaccaaaacaatctaacaacatacacagaacattccatccaacagcagcaaaatacacattcttctcaagtgcacacagaacattatccaagatagatcatatgttaggtcacaaaacaacaacaacaacaacaaagcaagtcttaacaaatttaagaagcttaaaatcatatcaaacatcttttctgactacagctgtaagaaaatagaaatcaacaataggaagaaaattagaaaattcacaaataggtggaaatgaagtaacacacacctgaacaagcaaaggatttaaagagggcagttaatagcaataaatgcctatatgaaaaaagaaaatcacaagtaaacaccctaacactgcaccttgaggacttagaagaacaacaagaactaagctgaaagttagtagaaggaaggaaataataaagaccagaactgaaataaatgaaactaaaaaaaaatcacaaaagataaaggaaactaaaagttttctgaaaagatgaacaaacctttagatagatcaaggggtgaagagaaaaaaaaaaagccgggcacagtggttcacaactgtaattgcagcactttgggaggctgagttaaaaggatcaactgagcccaggagttcaaggccagcctgagcaacatagcaaggtcctcatctgtacaaaaaaatgctttcaaaaatagctgggactgggcatggtggctcacacctgtaatctcagcattttgggaggccaaggtgggaagattgcttgagctcaggaattcgagaccagcctaggcaacacagtaaaaccctctctacaaaaaatacaaaaattagttgggtgtggtggtgcacgcctgtagtcccagctattcaggaggctgaggtaggaggatagcttgagcccaggagagagaggctgcagtgagctgagatcatgccactgcattccacctgggcaatacaggcagagattatctgaaaaaaaaaaaaaaaaaggcctcagaaataacaccacacatctacaccatgtgatctttgacaaaccagacaaaaacaagaaatgggaaaaggattccctatttaataaatggtgctgggaaaactggctagccatatgtagaaagctgaaactgtatcccttccctataccttatacaaaaattaattcaagatggattaaagacttaaatgttagacctaaaaccataaaaaccctagaagaaaacctaggcaatgccattcaggacataggcatgggcaaggacttcatgtctaaaacaccaaaagcaatggcaacaaaagccaaaattgacaaatgggatctaattaaactaaacagcttctgcacagcaaaagaaactgccatcagagtgaacaggcaacctacagaatgggagaaaatttttgtaatctacaaatctgacaaagggctaatatccagaatctacaaagaacttaaacaaatttacaagaaaaaaatcaaaccaccccataaaaaagtgggcaaaggacatgaacagacacttttcaaaagaagatatgtatgcagccaacagacacatgaaaaaatgctcatcatcactggtcatcaaagaaatgcaaatcaaaaccacaataagataccatctcaaaccagttagaatggcgatcattaaaaagtcaggaaacaacaggtgctggagaggatgtggagaaataggaatgcttctacactgttggtgggagtgtaaactagttcaaccattgtggaagacagtgtggcaattcctcaaggatctagaactagaaataccatttggcccagccatcccattactgggtatatacccaaaggataataaatcatgctactataaagacacatgcacatgtatgtttattgcggcactattcacaatagcaaacacttggaaccaacccaaatgtcaatcaatgatagactggattaagaaaatgtggcacatatacacaatggaatactatgcagccataaaaaaggatgagttcatgtcctttgtagggacatgcatgaagctggaaaccatcattctcagcaaactctcacaaggacaaaaaaccaaacacagcatgttctcactcataggtgagaattgaacaatgagaacacttggacacagggtggggaatatcacacaccagggcctgttgtggggtgggggtatgggggagggatagcattaggagaaatacctaatgtaaatggcgagttaatgggtgcagcaaaccaacatggcacatgtatatatatgtaacaaacctgcacattgtacgcatgtaccttagaacttaaagtataataaaaataaggaagggaggggggaagggggagaaggaaggaaggaaggaaggaaggaagaaaggaaggaagccaggcatggtagcacaaacctgtagtcctagctactcaggaggatcacttgagaccaggaagtcaaggctgcattgagccatgactgcagcactgcactccagcacaggcaagagcaagaccctttctcaaaaagaaaagacctccccctccccctccccctccctctccccacggtctccctctccctctctttccacggtctccctctgatgccgagccgaagctggactgtactgccaccatctctgctcactgcaacctccctgcctgattctcctgcctcagcctgccgagtgcctgcaattgcaggcgtgcgccaccatgcctgactggttttcgtatttttttggtggagacggggttttgctgtgttggccgggctggtctccagctcctaaccaggagtgacctgccagcctcggcctcccgaggtgccgggattgcagatggagtctcgttcactcagtgctcaatgttgctcaggctggagtgcagtggcgtgatcttggctcgctacaacctccacctcccagccgcctgccttggcctcccaaagtgccgagattgcagcctctgcccggccgccaccccgtctgggaagtgaggagcgtctctgcctggccacccatcgtctgggatgtgaggagcccctctgcctggctgcccagtctgggaagtgaggagtgcctcttcccggccgccatcccgtctaggaagagaggagcgtctctgcccggctgcccaccatctgagatgtggggagcacctctgccccgccgccccgtctgggatgtgaggagcgcctctgcccggccgcgaccccatctgggaggtgaggagcatctctgcccagccgccccgtctgagaagtgaggagcccctccgcccagcagccgccccgtctgagaagtgaggagcccctccgcctggcagccaccccatctgggaagtgaggagcgtctccgcctggcagctgccctgtccaggaggtggggggtcagcccccgcccggccagccgccccgtccgggaggggggtggggggtcagcccccgcccggccagccgccccgtccgggaggggggtggggggtcagcccccgcccggccagccgccccgtctgggagggaggtgggggccagccccccgccggccagccgccccgtcagggagggaggtggggggcgcctccgcccggccgccgccccgtctgggaggtggggggcgcctctgcccggctgccccttctgggaagtgaggagcccctctgcccggccgccaccccatctgggaggtgtacccaacagctcattgagaacgggccatgatgacgatggcggttttgtcgaatagaaaagggggaaatgtgggggaaagatagagaaatcagattgttgctgtgtctgtgtagaaagaagtagacataggagactccattttgttctgtagtaagaaaaattcttctgccttgggttgctgttgatctgtgaccttacccccaacccggtgctctctgaaacatgtgctgtgtccactcagggttaaatggattaagggtggtgcaagatgtgctttgttaaacagatgcttgaaggcagcatgctcgttaagagtcatcaccactccctaatctcaagtacccagagacacaaacactgtggaaggccccagggtcctctgcctaggaaaaccagagacctttgttcacttgcttatctgctgaccttccctccactattgtcctatgatcctgccaaatccccctctgtgagaaacacccaagaatgatcaattaaaaaaaaaaaaaagaaacagaagaactgctgaaagccattgcactagagccgcactacccaatatggcagccactagacatgtgtggctactgagcacttgaaatgacctgtgtctgaattgaagtgtgctctaaatgtgaagtgcacaccagattttaaaggcttagtataaaagaagcataacatatctcattaataattgttttctggcagagtatggtggctcacacctgtaattccggcactttgggaggctgaggcaggcagatgacttgaggtcaggagtttgagactatcctggcgaacatggtgaaaccctgtctctaccgaaaatacaaaaaaaaaaaaaaaaaaattagccaggcgtcacagcgcgcgctacttgggaggctgaggcaggagaattgcttgaaccgcagaggcggaggctgcagtgagctgagatcgcaccactgcactccagcctgggcgacagagcaagactccatctcaaaaaataagtaaataagtaaataaataaataaaattaagcctttaaaaaataaaaaaaagaaaaaaaaagaaaagaaaaaattaaaaagaacactcaaataaaatcagatatgagagaggaaacattagaactgttaactacagaaatacaaaggatcataaaagactacttggaaaaattacatgccaacaaactggataacctagcagagatgtacaaatttctagacacacacaacctaccaaacactaaatactaaaaaggagaaaatctgaacagaccaataatgaagaaggagaccaaatcactaactaaaaatctcccatcaaacacacacctaggacttgactgcttcatggctgaattatataagacatctaagaatatctaaaccaatccttctgaaattattccaaaaaactgaagaaggatgctacaaagagaaacttacaggccaatatccctaagtatacagatgcaaaaatcctcaacaaaatactagcaagctgaattcaacagcacattaaaattatcattcataatgatcaagtaggatttatccctggaatgcacggatggttcaacatatgcaaatcaatgtgattagaaccacattaacagaattaagtataagaatcatatgatcttgtcaacagatgcagaaaaaggatgagatcacaccactgcactccagcctggacgacagagcaagactacatctcaagaaaaaaaaaaaaaaagtgctgaagaacattaaccaaaagattttttttttttttgagacagagtctcgctctgtcacccaggctggagtgcaatggtgtgatctcagctcactgcaacctccacctcctgggttcaattgattctcatgcctcagcctccctagtagctgggatgacaggcgtgcactgccacacccagctaattttgtatttttagtagagacagggtttggccacactggtcttgaactcctggcctcaagtgatcctcccgcttctatctcccaaagtactgggattacaggcatgagccaccatgcccagccccaaaagatttgtaacctcaaataagttgagaaacatgctcaagtatcttaggggaagagggatcaagtactccttccattcatctttttaaaaaacattgagctaccattctccatgaaaggcatctgccataacccatggagctggcaggggcagggagcatcagcaccaaaccagaatagcatcgcaacataggaggcacctagcaaggtgtagctggtgcaaatatacaaaagaggagcccaattctattgccagggtcccttcttcaaatcacagtcacttgtatgtgcattaagaaatgcccaattcacatgaacacatgactccagatcctggagaagaacaggataattacccctcttcctgggatcatggctggtaagcagtatcctggggtgcattatggggactagcacagggtccaaactttatgacaaagactcttggccaacactcggaagggacaacacaaagcatgacacagcaatacacataaactccaacaagacaggcagccttcccaaatggtacagggtggaaagtaaaaaagttcctcttcaaagtttcccttcttgttaaagaataaatcataagtgttagaaataatattttcttttaggctgggcacggtggcttacacctgtaatcccagcacttttggaggctgaggcaggtggatcacctgaggttaggagtttgaaaccagcctggccaacatggcaaaaccctgtctctagcaaatagacaaaaatgagccaagcgtggtggcaggtgcctgtaatctcagacacttgggagactgaggcaggagaatcacttgaacccaggaggtggaggttgcagtgagccaagatcatgccactgcactctagcctgggtaacaagagtgagactctgtctcaaaaaaaaaagaagaaaagaaaaaaaaaagaaataatagtttcttttaaagactaacttccttcaagcctccttgctttgtgctaataactctttgttaagccctatcctatgtagctgttagatataagggaatgagtacattctatgtccttgtactttaaccaagatatttattctagacatgctcagccatgtcccagctcacagcttatgccccttccttatttggaaatgttattacttctctaagtcttttcgtaagcaacttcctcttttcctttgttttcccttgtctttacctatttaggaaagttttaagttattggccagtcaggtttagcttagattgtgtggtccacctccagccaatgaagacaggacacagcagcagggacaagctccataagggataaaaattgcttccctcctttgttcatgtgtcatctcgtcattgttccatctgcgaggaccaccctttctgcagaaagtaaaattgccttgctgagaaaattctttgtctgagtactagttcttctcagcacagaggaacaagcatttctaaaggaataagcattttacttatatggccaatcagcaagccacaaaaggacaaagggcacttacaagagactttccaccccagttcaaagtgatcttcaccctttttaccaactgtgttgtaaatggggcactaagtcacttttgtgggatgtttcaggatccctccaacacactcttgcaattacactttgagaggctcatgatattagatttattatactcatagatcctagaaagggaggcatgccatgccatgcaggggtccatgctggaggaggaccaaagcaggaggctctgacaagcatgtagggagctaagagagaagcctcccttgagggcaactgcctttactggggcttggggtatagtactaaagcaaaaggcattagatttcattggtgcatttgaatgttactaggtcatggtcaggggagggccaacagaagaacttgtagcataagtaccttatcatccttgtacatctggtcacttgagcagggagctcacagcctgtttgttagaatgctgaggcatcaagaaaatatgaattttttaaaatgtacaatgtattcagggaagaatgacaatatggaacctggaacgaagacatctggttggatccagataagaaacatgatcttaaaccccactatgatttggatgtggtctgtccccatcacaactcctgttgaggcttggtcctcaatatcacagcactggaaggaggggcctaatgagatgtttgggtcatgggggtagatctcacataaatagattaatgctaccaggcagaagtgaattttagctcacacaggactgaattagttcccacaggagctaactgttataaagcaaggctgctgtttgtgtttggtcccttttgcacaagcctgcttcctcttctgcctctctaccatgttttgccgcaacacgtgagcctcatcagaagtagagcagatgctggggccatgctcttagactttccaaccagcagaatcctgagccaaagaaacctcttttctttataaattactcaggtattatgtcatagcaataataaagagactaacacaacctaagacactttgagcctcccttaccagggacgtagcttaccctttggtttctgaggagaaagccttctgcttgaaatttttgtgacaatctcatttggtccagataccttggaaggtaatatatattctcctcaagatccacaccattatcacttatttttatcactagagtcctaactagtccaaaatccagggagaaagatatacaacataatgcaagagaaaaaagctcacacaacaaaaaaattccaactctgataatatatcacaagaaacccagggaacatgtatgggatggattctaagggtattagatcaagaaggttaaaatgttaacattagataggcccaaattcattgatatggagcactgatatggtttggatctgtgtccccaccaaatctcatgtggaactgtagtccccagtgttggaggtgaggtctggtgggagatgattggatcatgggggcagatttctcatgaatggtttagcaccatctcctttgatactgtcctcatgatctggtcatttaaaagtgtacagcacctccccctcattctcccttgctcctggctcctgccatataagatgtacctactcctgcttcaccttctgccatgactggaagcttccagaggcctccccagaggcagaagtcactatgcttcctgtacagcctgcagaactgtgagccaattaaactttttttattctgcaatttaaaacttttaattaaaaaataaactttaatgttgaaaatgcaaacttggagagggcagaaagatcacacacaaggctgtcacttcacacttggaggtttgcacagtggctcgacagaggtgctcctcacttcccagacagtggggcggccaggcagaggcgctcctcgcttcccagacagtgcggcggccggttagaggcactcctcacttcctagacactgcagtggccagacagagtcgctcctcacttcccagacagggtggtggccaggcagaggtgctcctcacttcccagacggtgtggtggctgagcagaggcgctcctcacttcccagacggtaggcagctgagcagagatgctcctcactttccagacagtggggctgccgggcagaggtgctcatcacttgtcagacagggcggtggccaggcagaggtgctcttcacttcccagacagttgggtggccgggaacttctttataaattacccagtctcatgtatttttttttttttgagacatgtcacccaggctggagtgcagtggcgtgacctcggctcaccgcaagctccgcctcctaggttcacaccattctcctgcctcagccttctgagtagctgggactacaggcagctgccaccacgcccagctaatttttttgtattttcagtagagacagggtttcactgtgttagccaggatggtctcaatctcctgacctcatgatccgcccacctcagcctcccaaagtgctgggattacaggtgtgagccactgcacccggccagtctcttgtatttctttatagcaatgtgagaatagcctaatacaggtacttactagacattttgaattttacatattagctaatggaccatggcatgattctaatagctaaactggttggatgattgaaacttgtactcatgacctagttaacagagttaatatgtaagagcttccctggctaatgtaaaggagggaatcctagacacacaggaaggttgcactgaatttatcacatgtgatctgcacagcttcccttcttcaacctacattaagggcccagaagacaccctcttcacaaaggcattcagaaatagataactgaagggaatacttccattcttgaaaagttctgtttattctcctttaaacatttgttaagactacaggagataacaatcattaagatgagttccctgtttcaatggggatgatgagaaccttgagtgccaaaaaccaagtgggtagcacttaactatcaaagacaatgaggccacatcgaatgtcaagggcacactgaatgtaccaataattggaatgctttggcctgcagagattattggtgttagcaaactgatcacatttcgtcactagcatgaaacagataagaaccctactataacagggattaataaatcttgttgtaatgtgacatatagtaaatgttatactctgtgggccacacagtctctgttacaaatactcaactctgtccttgtagtatgaaagaagcctcagaaaatatataaacaaatgaacatagttgttctgttccaattataatttacaaaaacaggttgaagattaggtgtgtcccataagccacagtttgccaatgtaagtcttggaatattgcttgatctatgtaacaagaagtctcaagtctaatggccaaaaacctgataagagtcaccacaggggagattcaaagtctctcacccaatcaccagacctaggtaacacaccactcaggattgtgcagaagtcacatcgactttggagaattacgggggactatcataacttatatcaattctcctgttttccaccgaaatagtcttcagaggttttgctattacacaaaacattgcaacactccatcacattgaaaatattttgtacatgatatcccatgaacaggaaacagtaaatagtttggatacctttacaggctacaaagtagaggatgggagattcaagagccagctaaataaacaaagttggttttgttttgtttttttgagacagggtcttgctctgttgcccaggctggagtgcagtggtgtgatcacggctcaccacaacctccaccttctaggctcaagtgatcctcccacctcagcctcccaagcatctgggacgacaggtgcacattactacaccaggtaattttttttcttttaatcttttttggtatagatgggatctcactatgttggccaggctggtctcgaactcctggcctcaagcaatctgcctgccttggcctcccaaagtgttagagttacaggcctgagccaccatgccccatccaatcaacaaagatttgtgggttcagttgtctagaccatatcaagatatcccctccaaggtgtcattcctagttagtgctccccaaaattaggtgcaacacttggcagacctataagattcttggccaggcatggtggctcacacctgtaatcccagcactttgggaggctgaggctggcagatcatgaggtcaggagattgagactatcctggctaacatggtgaaaccccatctctactaaaaatacaaaaaattagctgggtgtggtggcacgcgtctgtagtcccagctactcaggaggctgagacaggagaatcgcttggacctgggaggcagaggttgcagtgagccgagatcctgccactgcactccagcctgggcgacagagcgagactccgtctcaaaaaaaaaaaaaaaaaaaacagggataaaggctactatggctcaacagtatggacttccatttaccaaagctaatgcagctaatgctactgctaggtgcctaatctgctaaaagcaaaaaccaaaactgaatatataagggcattaatttcttttttcttttcttttgggggggggacaggtctcactctgtcacccaggctggagtgcagtggcatgatcacagctcactgcagcctcaatctcctgggctcaagcaatctttctgcctcatgctcctgagtagctaggactacaggcatgtatcatcaagcctggctaatctgggtggttttcgtaggggggttgattttttgttttcatagagatggggtttcaccatgttgcccaggttagtcttgaaccaagggcattaatttctagagtaaccaggggagccagctggtggcaagatgattacattggaccactcctatcatgaaggtgactaagattcatcttcactggaatagactcgtgttctggatatggatttgccagaagcctaactagtagagaggcaaatccatataggatttgtatagaggcagatttgtacagaggagaggcaaatccactaggcttttgcctatacaatgcataatccatgcactcacaaaatgctttcactgcagtcacagcattcacacaataccatctttcatcaaggaacccatttcactgcaaaggaagtgcaacagtgggaacatgtccctctcatcagctggtctcatcacacaccccatcactcagaagcagctagtctaaatgaaaggtgaaatagcttactgaaaattcagatacagggccaactgggagacaacctctgaaagaatgggattctgtttcacaagacacagtgtatgctctgaatcagagatcactagatactactatctcaccacagtcagaacaaacaggcccaggaattgatgggtgaaggcagaattagctctaagacaaaaattttgcttccaatcccagcaatgtagagcactgtaatttggagatctgagtccataatggggaatgcttccccaggggcaactatttatttggtcccaatacactggaaagtgagattaacatctggcccttataagtttcatatccattaaaccaagaagaaaaagaaaaataaggaggtgagagggtataatctattaactgaagggattaatctcaactaccaaagggaaactggggtactactatacaactgaggcaaaaagaatgatgtctagaacctcctagcacttccataccacttagaaaggttaacaaaaaattaccgtagaaaaaaggcaggaaaatggaggaccaagatcccttcagaaggaaggtttgagtcactccatcaggtacagagcccagagctgctgattctggctgagggcaaggaaaatacaaaaaatgttcatcgaaaaagtaaaaccatggatagcaactataacttcaagatcaatgacagaaacaacaactgcagtagtctggcaggttttctgtttttgcttttttgagacggaatctcactctgttgcccaggcaggagtgcagttgtgccatctcagctcactgcaacctccacctcccagattcaagccattctcctgcctcagcctcccaagtagctgggattacaggcgcccgccacgcccaactaatttttgtattttcagtagagacaggggttcaccatgttggccaggctggtctcaaactcctgacgtcaagtgatccacccgcctcccaaagtgccgggattacaggtgttagccaccacacccagccccaggttttctctttgattgttacgtatacatgttagtttctaagcatgtatttacataaaccaatcattcacttctgtctcttttctatttctattttgtatataagttactagaggttaaatttttaatttagtcttcaggtaacagaatattcaaggagaatatgactaaatttcagtagaaattaacatggcttcaggcatggtggctcacacctgtaatcccagcactttggaaggccgaggtgggcacatcacctgaggtcaggagttccagaccagcctggccaacatggtgaaacactgtctctactaaaaatacaaaaattagctgggcgtggtggtgtgcacctgtaatcccagctacttggaagctgaggcaggagaatcacttgaacctgggaggcggaggttgcagagagctgagatcacaccaccactcccagcctgggcgaaagagtgagactccatctcaaaaaaaaaaaaaaaaaaagaaattaatatggcctgtgatgaggggctgtgcacattctcacttaggggtgagaaattctcccttcaatcttgttaagtggaaatgcagacttaaccattataagagaatcaaagtgtgtatagatgggcacatgtggatgctgactaggcaaaactgtgaacatgccagttaccaagttatccatctcagctccaaattcacgatcatatctgctaggaacaaagggctgcattccttaagcatttatcttttaatggaacatgttaagctttatcatgttgcattaaaagatgggagggaggccaggtgcaggggctcacccctgtaatcccagcactttgggaggccaacgtgggtggatcacctgatgtgaggagttcgagaccagcctacccaacatggcgaaaccctgtcactactaaaaatacaaaaaattagccaggcatggtggcaggtgcctgtaatcccagctactcgggaagatgaggcaggagaattgcttgaacctgggaggcagaggttgcagtgagccaagatcacgccactgcactccaccctgggcgacaagagcaaaactccgtctcaaaacaaaacaaaacaaaaaattagccaggcatggtggcgaatgcctgtaatcccagctactcagtaggctgaggcaaaagaatcacttgaacccgggaggcagaggttgtggtgagccaaggtcacaccactgcactccagacagcaataagagtgaaactccgtctcaaaaaaaaacaaacaaacaaaacaaacaaacaaacaaacaaaaaacctgctggtagattctaggagctgagcacagcctctagcaacagccagcaacaagtcctataactgcaaggaaatgaattttgcctattgactgagtgtggaaatacattctgttataggcagaggttggagcaagccgaggttgcaccaccgcactctagccagagcaacagagcaagactctatcaccaaaaaaaaataaataaaaataaataataataaaattctactgtaggtttcagctaaggcaattaaacaagacacagcatgcttatcaaatttgtaaatggactatagaatttgatgactgatagaactggattcaaaattactgccacaggctggagtgatacactgaataaataggatatttatttttaaaaaagaaatagaatatacaacacaagaattaaacaacactcatataaaatgtctcacacataaaatataaaccaaaacactacacttctggccagccacagtagtagctcacggctgcaatcccagcactttgggaggccaaggtgggccaatcacttgatgccaggtgttcaagaccagcctggccaacatgatgataccgcatctctacaaaaaaataccaaaattagccaggcgtggtggtgcatgcctgtaatcccatctacttgggaggctgaggcatgagaatcacttgaacccaggaggcggagggtgcagtgtattcagatggcaccactgcactccagcctgggcaacagagcaagaatctgtctcaaaaagtcgggggcggggaaagaaagaaaagaaagaaagaacactatacttctgaaaatatatttgagtattcttattcaggatgaaactgaacaagacactgactttctttttgaaaacaagtggctttcagttaaaactaaaatctattttcagatgtagcaacagtaaaacaaacaaacagaaaaaacaaacaaaaaacaaactaaagtctgttccttatttctctccagaataatttttacactttacaatacatccattcagaaactgccaaatggtacaagacctatggatgggaatttataatatccagcaaaattaaatgtatatttgtcctctgacctaaagtccaatattaaaggtttaacctagtaatacacttataaaaatgttaactacatataaagaagttcatttactgcagcttactcatggatgctaaaataattagtaggaacgttgccggggaacaagatattctgggcgtcctgcaagggatggtggctcatgcttgtaatcccaacattttctgagattgaggtgggaggatcacttgagcccagtagttcaaggctgcagtgagctaggatcgtgacactgcactccaccctgggcgacaaaatgaatctcaaaaacaaaaaacaaaaaacaaaaaaaccccgcaaatatatatatatttttgtattttgtatttttagtagagacagggattcaccatcttggccaggttggtagagaactactgacctcgtgatccacctgcctcagcctcccaaagtgctgggattataggcgtgagacaccgcaccaggcctggctttggtctttttgactaaacctcttctgaaatgtgttcaataaaaagctgaacttggaaaaaaaaaaggtgggggtgggggggacagggaggaaggcaagaaaaacaaaagacaacaaagaagatcctggccaggtgcagtggctcacgcctgtaatctcagcattttgggaggctgaggcaggcggatcacgaggtcaggagatcaagaccatcctggccaacatggtgaaaccccatctccactacaaatacaaaaattagctgggcgaggtggcacgtgcctgaaatcccagctactcaaaaggctgaggcaggagaatcgcttgaaccagggaggcagaggttgcagtaagtcgagatcacaccactgcactccaccctggcgacagaacgagactgtgtctcaaaaaaaaaatagaatgaaatcctgtcattttcaacaacgtagatagaactggaggacagtacgttaagtgaaataaaccaggcacagaaacacaaagttgggcgtggtaagcggtggttgcagtgagccaatatcatgccaccgcactccagcctgggcaacaaggcaacatcctgcctcaaaaaaactctcaaaaaaaaaaaatcttgaatagagctcagatccaaaaacattccgttatattttagaagaatttggagaattttcatttattatacatagtaaatattagataacattattatttttaattttcttgatgcaaatagtattacggttttagtaaaacaacactcttatcattgagtcaggcattacccactacttaaatgtcgagcttaccatcctggctatcacggtgaaaccccatctctacaaaaatacaaaaaattatccgggcacggtggcacacccctgtaattacagccacttgggaagctgaggcaggagaatcgcttgaacccgggaggcagaggttgcagtgaggcgagatcgcgccactgcactccagcctgggcgacacagctagaccccctctcaaaaaaaaaaaaaaaaaaaaaatgtcgagcttcatctctgcaatgaatttcccattgactctcaaactgttcaccataaaatttatttacgagacggcgaatacacaaaacgctaaaaaacaggtgcagctacaatggatatttattcgtggtactggatggtcaacatacccataggtttaagttttttcgaaaaaaaatgcgggaaaaatacacttagtacagtcatcctgttaatggtaaattcgattattctagtattagtgtgtaaaccctccatcctttcttccaggaagcctggttatgaagctctttggagacgtacagagctaggaacttcagatgaaaagaatggctgagtattcttaggtttctttagtagaaagactcgcggtctacaaacgtttatatgcacatgcagaaatacgcacaccctagacaactaagaaagcacctttctaccggaacgtaatgtgtcaataaaaaatatacaggtttcacaaaggcaaaatgccaaaatctcacatgaaacactcgtttgcataaaaaaggaagcagctgcccccttaaaccaactttttcccaatgctcacccgaacacggtggagtcgccaggtccgtggggctacaggatcttggggacggagtcaatcgaacgcgaacggcaaaattcttttccctctgaaacacaattcacaaacgttgccttggagacttattttttaaggcctcagaacgcttggacacttttgaagacgggaacacacggctgaaaacagccctcggacgcgcccatactgcacttcccacccggctcctctaggggaccgaaggtcccaatggcctcttcgacgtggcctcacccgatggctccgcgactcctgcggactcctgtggagtggtccaggcctctgtaaggaggttcctcgattaccctgggtcgattgtgacctctgccaccccccgaaacaccgcccaacccactagtccacacgagcctcaccaaagtagtgaacgaccagacaacacaaaggaaaaagtggctctgaggaaacaggcgccagcgaccaaaagagagaactggcgcgccgcaacgtcacttccgtttggggcattggaaggggcgtggctcgttgtgtgggcagttggacaggatggaactcttcaggattctagtttccctccgcgtgggtgcggaggtatcaaggggtcggctcagtgcctgggtgggcaagagagaaatggacccacagagaaaggtgggggttaaatcagggctgtgggcggggcccatgcccgggggcggggctggaggtgggaccagacccagccggtggcttcggtggcagaatggaccaggaaggcgaaacgtcgggcgatggactcgcccctcaggatgctcattagaaactttccccacgttcctggacccctttcaggattctctccagttgataacctgccaatccacaaaatggcctgcttcctgcattcgatcacgtctttagaactttattttctcttatttctttttatttatctgaccttgctaaactctaatcattgattcctctgcgttttcagttatcgatactttctgtaaatattgcaatttttttcttttctttcttttttcttttcttttctttttttcttcgaggtagggtctggctcggttgccaaggctggaatgcagtggtaggaacacggctcactgcagtctccacctctccaggctcaagccatccttccacctcagcctcccgagtagctgggaccacgggcgcaccgcacccggctaatttttgtattattattattatcatcattattattattttgtagagacaggatctaaccatgttgcccaggctggtctggaactcctgggctcaagtgatctgcccgccctgcactcccgaagtgggattacaggcgtgagccatcatgcaccatgcctggccttattgtatttttttttcttcttcaacaatgtatttgttactatttctcaaatcttatcaaatgattcaaagcctcctgtactactttatgaaataacactgataccaggcattcttcacttattctgtgcagaaaaagaaaggactgttggacttgtggtagagatttagttgaatcttcgggttatattggtatctttataatactgagtcttcctatgtgtgaatatacaatatctctctatttaggtcttctttaaactctttcagtaatgttttgaaattttcagtttacaaatattttacctcttggggtaaagttattcccatgtaacttatttgtaaaagggatcacattctcagtttccttttctgattgttcattgctggtgtatagatacaaaactaattttcatctcttgatgttgtactgtgcaactttacggaatttattacaagctctgctagttttcttgtagattcttcaaaattctctatatatcaaatatcacctataaatatatttttatttgttctattctaattgagaaaccttttattttattttcttgtgtaattgctctggctagaatttcctgtagaggctgggcacggtggctcactcctgtaatcccaacattttgggaggccgaggtgggtggatcacctgaggtcaggagttcaagaccagcctgaccaacatggtgaaaccccgtctctactaaagatacaaaaaattagccaggcgtggtggttggcacctgtaatcccagctactcgggaggctgaggcaggagaatcacttgaacctgggaggcggaggttacggagtttgcagtgagtggagatggctccattgcactccagcctgggtgacaagagcaaaacttcatctcaaaaaaaaaaaaaaaaaaagaatttcctgtagaatgttgaataacaatagaaaaatcagacatctttctctccttcctggtcttagggagaattttcaggcattcactattgaatatcacgttagctgtgttttcgtaagtgcgttttgtcacgttgaataaactcccttctgtttctagttttcttaattttttttttgagacaatctcgctctgtcacccaggctggagtgcagtggcatgatcttggctcactgcaacctccacctcccgggttcaagcaattctctgcctcagcctcccaagtaggtgggcactcccaagtgcccaccacaacacctggctaatttttttgtatttttagtagagacggggtttcaccagcttggccaggctggtctccaactcctgacctcatgatccacctgccttggccacccaaagtgctgggattacaggtgtgagccaccacgcctggccagttttcttaatttttatcaaggaaaagtgttgggtttcatcaaatgcctttcctgcattagttgaggtgattctgtgggattttttgtcttttgtactaatgtgaagaattacattttttaaatttccttttgttgaaccaaccttgcattcctagataaatctcactagtcatggtgtatagtgcttttaatgtgctgttggatatgatttgctaatattttttaaggatttttgcatctatattcatgaaagatagtctctaatttctttctctttagctttttttttttttttttttttgagatggagtctcacactattgcccaggctggagtgcagtggcacaatcttggctcaatgcagtcttgaccaccacaggctcaagccatcctcccacctcagcctctcaagaagctaggaccacagacgcatcaccatgcctggctactttgtgtgtgtgtgtgtgtgtgtgtgtgtgtgtgtgtgtgtgtgtgtgtgtgtgtggagtgttgctcttgttgcccaggctggattgcagtggtgtgatctcggctcaccacaacctccgcctcccgggttcaagcgattctcctgcctcagcctctcaagtagctgggactacaggtgtgcatcaccacacctggctaatttttttctatttttagtagagacagggtttcaccatgttggccaggctggtctcaaactcctgacttcaggtgatccgcccatctcagcctccgaaagtgctgggattacaggcatgagccaccacacctggctaatttttgtatttttttttgtagagatgaggtttcgccatgttacccaggctggcctccaactcctaagctcaagcaatctgaccaccctgggcctcccaaagtgctaggattacaggcatgagccaccactcccagcaagagatattttttatctggcttcagtaacaatgtaatgaatggcctcatggatttagaaagtgttctctctggccaggcacagtgtctcatgcctgtaatgccagcactttgggagaccaaggcaggcggatcacttgaagtcaggactttgagacctgcctggccaacatggtgaaagccaggctctactaaaaatacaaaaaattggctgggcatggtggcatgcacctgtaatcccagctactggggaggctgaggcaggagaatcgcttgaactcgggaggcgcaggttgcagtgagctgaaatcatgccactgcactccagcctgggtgacagagcaagatctcatctcaaaaaagaaaaaaagaaaaaaaaaagtgttctctcatgttttgttttgtttcggtttggtttggtttggtttggtttgagacagagtctcgctctgttgccaggctggagtgtagtggcgcaatgtcggctcactgcaacttccacctcccaggttcaagcaattctcctgcttcagcctcccgagtagctgggactacaggtgcataccaccacgcccagctaatttttgtgtttttagtagagatggggtttcaccatgttggccaggatggtcttgatctctttaccttgtgattcacctggctcagcctcccaaagtgctgggattacaggcatgagccacaacacccggcctcctgttctacttttttggaggatattgagaaacactggtgttgattactctttaaatgtttagtacaattcatttgtgaattgacaattcattgttggaaagttttgaaatactgatttaatctcttttcttgttataggtctcttgagatttttcattactgtttaatccagttaatttctgtgtttctagaaatgtgtccacttcatttaggttatctaactagttgtacaattaattgttcatagtatcctcttataatctttatttctgaatagtttgttgtagtgtgccccagtttcatttctaattttaattatttgcatcttctgccttttttgtcaatctaggtgaagtttttcaatgttatcgatcattgcaaagagtaacttttagtttcattgattctcattgaatagattcttatctattctccatttcacgtatttcccttctttattatttcctttcttctgttagattagtttactttcctcttttttggtagttcctcaagatataaaattatttataggtatttacagctataaatttcctactgaggccaggtaatgtggctcacacctgtactcccagcactttgcgaggccaaggtgagaagattgcttgagcccaggaattcaaagctgcagtgagctgtgatcatgccacagcactgcagcttgggggaccagagccagaccttgtctcaaataataataataataattttccactgagcactctcttcattgcatcctataagtttaggtctgtcctgtccatttttgtttttctctacatgttttcttttgtaatttgtttttgttgttgttgttgtttgtgactaacagaaatttttttcttatagctctagaggctggaaagtccaagaacaaggcacaagcagattcaatgtctcaggagggcctgcttcctggttcatacgattgtcttctcactgtgtcttcacatagtgcaaaaggaaaggcagctatctgggcctctcattttaaaattactttgttttttgatatgttttgagaaaggatcttgctctcttgggcaggctggagtagagtggcaaaatcacagcttactgcagcctcaaccaactgggctcaagcaatcctctcacctcaatctccagagtagctgggactacaggcacatgccaccatacccagttaattttttagaaaattttttgtagagacaggggttcactatgttgcctgactggtcatgaactcgcagcctcaagtgatcctcctgcatcagcctcccaacgtgctagaattacaggcatgagtcattgtgcccaacctaattgctttaattgacaaattttcattgtacatattaatggagtataaagtgatattataatttatgaatataatacagaataattaaacgaagctaattaacatatccaccacctcaagtacttattatattttgtggtaaaaacaggtgccttgtaatttgttcttgatctcctgttttttaagtgtgtgttaattcacacatatttatgtattttaatgtttttctgccattatagatttctagcttaattctgttgtgttctgacaggtactttatatatattcagtgcttttaaatttactgagactctgctgggtgcggtggctcacacctgtaatcccagcattttgggaggccaagagtggatggatcatttgaggtcaggagttggagaccagccttgccaacatggtgaaactctgcttctactaaaaatacaaaagttagccaggtgtggtggcatatgcctgtaatcccagctacttgggaggctgaggcaggagagtcacttaaacctgggagatggaggttgcagtaagccgaaattgcacccctgccctccagcctgggcaacagaacaagactctgtctcaaaaaaaataaaaattaaaaaaaataaatttcctgagactcattctgtggcatatacatttgacatatcctgaagatgttccatgtgaacttaagaatgtgtgttctcatgatatcagatggactgttctacatgtctctgaggcttagttggcttaccgtatttttcaagctatgtccttactgatcttctatgtagatgtccttttattaaaagtgtcatatataactctccaattattgctatagaacaatctatttctcccttaagttttgtcatataactttggggtctgtttttggtgcatgcatgtttatgattgctacatcttctttttctaatttttaatttttttaagagacagagtctcggctgggcacagtggctcattcctgtaatcccagcactctgggaggccaaggagggtggatcacaaggtcaagagattgagaccatcctggccaacatagtgaaagcccatctctactaaaagtacaaaaatcagctgggtgtggtggcacacacctgtagtcccagctactcaggaggctgaagcaggggaatcgcttgaacctgggaggtggaggttgctgtgagccaagattgcatcactgcactccagccaggcgacatagtgagcctttgtctcaaaaaaataaataaataaataaataaaagacagagtctcattatgttgcttacactgaacttaaactcctaggctcaagcaatcctcctgcctcagcatcccaagttgctagaattaaaggcatataccatcatgcatggcttattacatctcttgatgaattgaagcttttatcaatatattgccatcctttgtatattataaagtcttttacttaaagttcgtttgtctgatatcattatagtcaatccaattatcttttggttgctatttgcatggaatatcttcttcccatcctttcactaacagcctatctgttgctttttatataaagtgaatttcttgtagacagaatacgatttgatcatggtctttattatttcatccattcttcaacagcatgactttttcttggagtgtttgattcatttacatttaaagtaaaaataaagaaggattttcttcctgccattttgctatatgtgttctgaatgtcttatacttttagctccttatttcctccactgctgatttttttgtgtttacttgatttttagagtgaatcatttaactctcttctaattttcattgattttgttttgttttgttttgtttttcagacagtcttgctgtgtcgtccaggctagagtgcagtggcacaatcttgcctcccaggttcaagtgattctcatgtctcagcctcctgtgtagctgggactacaggcttgtgccactatacctggctaatttttgtatttttagtagagacagggtttcaccatgttggccaggctgatctttaactcctgacctcatgtgatctgcccacctcaccctcccaatgtgctgagattacaggtgttagccaccacaccaggctttcattcatatttactttctttctttctttctttctttctttttgagatggagtcttcttgctctgttgcccaggctggagtgcagtggtgtgatctcagctcactgcaaccaccacctcctgggttcaggtgattctcctgcctaagcctcccaagtaactgggattacaggtacgcaccaccacgcctgggtgatttttgtatttttagtagagacagggtttcaccatgttggccacgctggtctcgaactcctgacttcaggtgatctgcctgcctcagcctcccaaagtgttgggattacaggagtgagccactgcacccagccaaaactttaacagccctcataaggattacatttaccattccaaagttatattatttgaatttgtacctacttaacttcaatagcatacaaaaattctgctatacgactgcacgcttctgttgttttttttttttttgcaaaatatatctttatatattgtatgcctaaaacatacacttataatttttattgatttttaaaaaattcagtaaaaagtaaaaactggaattagatacaaaaataccataaatgtggttttatattttccaatatacttacctttactagagatctttatttctccacacagcttgagttactgtctagcatccttttattccatcctgaagaactccttttagcatctcttttatgtttatttgtttatttatttatttatttgagacagagtctcactctgttgcccaggctggagtgcagtggcacgatcttggctcaccaaaacatctgcctcccgggttcaagcaattttcctgcctcagcctcccaagtagctggcagtacaggcatgcaccactgtacctggctagtttttgtatttttagtagagacggggtttcactatgttggccaggctggtctcaaactcctgacctcgtgatccacctgcctcagcctcccaaagtgctgggattaaaggcatgagctaccacgtccagcagcatttcttgtatggcaagtgtagtggtaactgtccttggcattagtttttctaggaatgtcttaaattctccctcatttttgaacatttctggtgagcacagaattcttggttgatagtgtttctttttcagctcttaaatatgtcatctcaccgactatgtcccccatgatttctgatgacatatttgttattaatagtattgagaatcacttctttcagcactctttgtctttgccatttgacattttgatgatatgtgattcactgtaggcctgagtttctctttttttaatgttttttttttttgagatgaagttttgctcttgttgcccaggctggagtgcaatggtgcaatcccagcttactgcaacctctgcctcccaagttcaagggattcttgtgcctcaacctcccgagtagctgagaatacaggcacctgccaccacgcccgactgagtttctcttacttggagtttgttgagcttcttggatttaaagattcatgtctttcatcaaatttggaaagttttgcttaatatttcttcacattttacttcttcccctttatttctctgttatctttcttcagcttccataatgtgtatgttggtctgatgcatggtgtactacaggtcctttaagttctgtttggtcttcattctttttcctttagtcccctcagagttgatatttttcaaaggttctatcttcaaatttgtggattctttcttctgcatgctcacatcttctatggaagagaagatgcaaccagtgaccaaagaactaatgttaggagtttggctttacaaagaaaatagctccatgttatcttatttagaattggtaggtattttatttagaaagtattttgaaaagaaagtaaaaaaggatataatctagaaagaaaagtacagaaaactttacaaagaacactaaataaaaacgtttaaaaggaattaaaacagttccttctctgagaataaatgaaaatgtgaataaatggatagacaatgaaaaggtggaaaatctcatgtaatagtgttttttatcttctgccacagaccccagaggactgagcaaaggaggatgaacacaggaataaagacaaagataaaaagatctgttttaaaagaaggggtcagggggctccttgcttctagtgaacaagggccctgagcttctagagccctttgtatttattgagtaaaggaaatagggaggagcaggtgatcatgagccagttgcatgatttagtgcaggcctgcatgtctgctttccttgaacagtaggctccagatattccagtagataacctcaaggtgcacagtgccagggagtgattgccctcagcctaccttctggtggcaggcacagatgtgagtttgcccacatcctgcattcatgataaacagtttgctgtttgatcatatagcctccaatggaatgctgagttggtcatgaccctcaggttttcagctcccaatatctccccctttctgtttttgcattaattgaatgaatgtaaggccaggttgggcagctctcattttctgattggcagtccatccaattttatagactatgaacagaaaacaaagacagaacagcattattcccagaactatacatgagatgttaatgtggcgctttagataggtccaaggattgaggctctccagacctcactggaatttggtccaggcttctaaagaaggctgaaactcttgagtttgcttatttaaaccaataattttgtttcataattcaccaatatcaaaggcgatattggatgtgaaagctccctgcaaatgggctttcacaaggtcccatggatactcactttggttatattctaagttggttacacaaatatgagtgtgattaaaatgacagcacaattgctgttgcaattgtaagctttgtacttgttgccctaaccatggaaccatggatttcaacattgccacttcagtttgtaactcagtgttaattttactctgaagtagccatattttcttggtggtacatgtctagttctccacgtactgagctgtttgaacagaactatgcaaagctacagaggacattactacagaagttattagtgtgaccaaggaaataatagcaaaaattatcatgcctaagactttacgggtacaatgagtaagctgagttagaagtttcatgaagtgcaaagcaggggtggaggcccaaggctctgacagattaacaggaatccatatcccagggatgcgacccataattatcaaggtagagatgtgtttgcaatgtgctatgattaatgcagtgatataactgacaagatttacaggtcaattgggtattgtttacctggagctggtccttcttagctgccataaagacataaggattaaaaacacaaaccgtaaatttagtggtgatactctttacaaatgtaacatcaaaactgtgtcgagtagcagtactagtattagagagtacccctacccagatagtaccatttgtaaatgggactgctgctttccatattgtttcttgaattggacctttcctacctagatattgccactgaagaagaggcgggataaagcctgttccatgccaagcaaccctggcagcagaatgggattggatcctggtgtggtgtaaagaagaagcattgaaagtctgctaccaatgacagtgaagtttgtgccatgatgtctgattttatctttaccatctagttgacctttaggtccccaagtcacaatgtcttcagttaacatagattgttttctagccagtgggccaagacattgggtccatggagcggggtaggaactattgaagggaatccattccatatagtcaacacaattggggtgattgggccgggaatggttggttagcacaccagttacattaatagaactaagacctaataagcacatgacttttccatggtgactcaaccatgcttgagcttgaattgtaagacagctactacagttgagcaatatctttgtagtgatacaccaggggagtccttccagtggggccatataattgatgacattgttctgagagtctaactgttctatgtcaggaggagttagaggtcctggagcccatgctccctgatcatgatagatctcagggggagtgccactccaaagtacaagccatactactaggggattagaaacatatgcccaatatgtttttgcctctgcagagagaaaacataccacacaggacattatggctaacatggccaagaacatggattcaggggtttttgcctggccctgacgctccagcattttctcagcttcctgcgtggttttcttgagttgccctcaggttatggggtttgatgtcctcgtgactccggtcagccttttctccatcttcacactcaggctcagctggctcatggcccataccggagggaccaggcccatggttggccgccatggatccctccagtctcctgttccatggttgcatgcaccttgaggacacccaaatggtttgtccatctcctgtaaaaacacaagcataccctcatccccatgtcaataagtccaccaggcctttccattgtccttccagggatttccataacactttcagaagaactttcctctttttctctaacacttgccaatgtctttctgctggagtcttaccaccaataccaggagtcaaaaaatttaaagtaaatagggctaagtgtagttttgtttgaggtagtagctggtctgctattccctctttctgttttttcaacatgcattgtaatgtttgatgtgcctactctataattccttgtcctcaagggttgtaagcaattcctgttttgtgagtaatagctcaaagctgtaggaaattttgaaaagcattactagtataagcaggtccatttgccaagaccagctcggtcagggagacactaatccagcggtgctagaggaattaaaggcacacacacagaaatatagaggtgtggagcaggaaatcagggatctcacagccttcagagctgagaacctcgaacagagatttacccacatatttattaacagcaagccagtgataagcattgtttctatagattatagattaactaaaagtattccttatgggaaacaaagggatgggctgaaataaagggatgggtctcactagttatctgcagcaggagcatgtccttaatgcacagatttttcattctattgtttgtggtttaagaacacctttatgtggttttaattggtagcaaccaattaatgtcccctaacaattgtcaaaaatcatttaaagtctgtaacctgtctttacagagaaccattttctgaggccgtacactcctctccataacaatagttcctaagtaatggtatggggaagttgtttgcactttctctggagcaattttgagcttccatttaacaagagcttgctttacttctctcaataattgatgcaatatttgatctgtaggtgcaaccaaaagaatatcatccatgtaatgaatgatatatgcagtgggaaacatattttgaggctcttttaatgctctttgcacaaaatgctgacataatttggtactgttaagcacgtcttgaggtaaaactctccattaataatgagaaacaggttctttttttattaatagaaggcacagagaaggcgaatcaaggcttatctttctcatgtaatagtatagtaaagaaacaatctttaagatctgttactacaagaggccagtcccttgggatggctgcagggatggcagaccttgctgtaatgcacccattggtttaatctgtgcattagtagctcccaaatcatgtagcaatcaccatttccctgacttctttggaattacaaatactggtgtattccagaagctaactgactcttcaatatgtcacgcatctaattgctcttttactagctgatggagttgagctagtttctcctgtgataggggccattgatccacccacacaggtttgtcagtcagccattctagcaacaaagcagtggggagaggagaaatattaatgactccaatcataaatcctgatgtccctatctttttctgtctttccagttattgatatcaggttagggtttccttgtaggaatttttctaaacctttcccattctgatatcccatgtctttcaacattttaaatcctgggttatcaacgtgttcatttgtaggtcacatatcccaagctgtaagtaagtctcgaccccataaattgatagctatatttgcaacataaggctggaaagtacatgattgtccatccggaccaagacaaggtaaaatctcagcactctgttgaatgctttgagcagctcctattcccactagggatgtggaggttcatctgaggggccaagatggaggccaatccttactagatattactgacacatcagctcctgtatctacaagctcataaaatttttttcctttaatttgcactacacaggtgggtctattagaggctatgggttgtgataaatagatttctcatgcagttgtgctctcaaatcctttatttcctcatttctcctttcatggagaagggtgtaatttgcaggggataggcaataattgcactatatatgcacctggttcaaaaacccaaagatcttgtgacattaaaactactttaatttctccttcataatcagagtcagctactctggggactacattgatgccttgcaagttaaggcagctttgcctaaaattagtcccatgtatcctgctggtatatgtccccaaatgccaggggggactttggtaggtttgtctcctccaattagtgtaattctttctctggcggagagatctaatcctgcacttcctggtgttcctggggaaagggaatcaatatttgtcctgggacccacccctgaagtggggttgtggtctgaactgggaatgccctcattgtttgaggggcccaggtccaggcccccttatcgtttcccaacaggtggggtgccattctgatgaaattttgagtggcattgattagcccagtgatttcctttgtcacagcgaggacagagtcctggcattttttctgctggaaaggacaccacattgtaaagtcctttcttttctgagatctggtggcattcctttttaaaacttccagtttttccacaattttaacattttcccactttggggtttgacccttggctccctttagatttgtcaactactaaactagccattgcttgagctaacattgtagaatgatgattcagttcctacaccctgaaaggctttaaggtaattccccaagctctttgtggatctcagagcagccattgcatgcttgcaatctgcattttcattttcataggctagagttatggtaagcatttctgtagcagaggcctgagggacctgatgctgcactgcctcttgcagccacgtgataaattgtccataaggttcccatgatccctgcatgacaagtagaaaagactgcactggaactccctcttcaggaattgtgctccaagcatgcttagcggctaaggcagactggaggtaagcggtctctgggagtgttaattgttgtaccagatctgaaaaggggtcacagcctgtcagcattttctctgtagtgtttccttgaccagaggcatgattctgcccagcctggtctgtgcacatttcttgtcaatttaaactccatgcgagatatgcactgacagataagcaagtgcgagccaaatgttttatatcaaagggtgggaggcgcatggctccaaacactgatactaacagccttatagtaaacaggctttgcaacccattattaaccacactagcttttaattcttctagtaatttaaactctacaggactgtgctcatgtaaaagatgttgcagatcattcggatcaggccttacagtaataggaaaactgcaaggtcctaaaggttccccagccgtagcagcagcacacaaaattttttgtacatgggtttctacttctgttactggatggggtggcagaggtcaattctcctctcctatttcctgcttagcaaacagccaattctcctcccctttctcctgctcattattttcaataggcactgtcagagaaacaaatgatgtttttaattcttgagactcagaacctgactcctgttgtctgacagaataagaagacaatggcagtaggaccatgtgaaccaaaacccaagcagaaaaaacagaagggtctactttgagacattttgatgagcccatttcaatccctcttctactttgtcccaattttctacattgagagtgcctgcctgcagaaacaatgggttatgtgtcataacctcctgcagaagcctagttaatgtctgtgaattaacttgagctccaggctgtttcaacagaactttaagcaattgcacataatgtttttcttcaacagacaaattctgccccatgttaccctgattcagaacttcccattcccagcacttctttagagcactgaccttatactccctgctggcagatttgtccctaggtcctcgttcatcttgttagcttcacttcctctgctccagcagaccttcttcattcacgtccttgaagtccctgttcatgatgccactttgccacagaccctggtggactgaacaaagggggacaaacagaaataaagacaaaaacaaaaatatctgttttaaaagaaggggttgggggctccttgcttctagtgaacaagggccctgagcttctagagcccttcatatttattgagtaaaggaaatagggaggagggggtgattgtcagtcagttgcttgatttagtgcaggtctccatgactgctttctttgaacagtaggctccagatattccagtagataacctcaaggagcacagcaccagggagcgattgccctaggcataacttctggtggcaggcgcagatgtgagtttgcccacatgctgcatttatgataaacagtttgctgtttgatcatatagcctccagtggaatgctgagttggtcacaaccctcaggctttcagctccccaaatttttcactatagagaattcctttatgtaaggaattacttctttcagcactctttgtctttgctatttgacattttgatgataatgtgactcactgtgggcctctctgagtttctcttacttggagtttgctgagcttcttggatttagagattcatgcctttcgtcaaatttggaaagttttacccattatttcttcacattttaattcttcccctttatttgtctgttatctttctccaatggcttctcactagacaaggttatcccacacaatgacacttttctgcctggggctcacctgtacaggtgacttgaaggattcctctcttctctgacctcaccattttgtgctacaccttcttaatcatactacatttgcagagctgataccctgctcatgggacaagacacaggatgtgggagtcatgagtaggagacaagaactttgcataaaaagaattctaacactttggatttaaagcgttctgaagatagacaagtccaattttagaaacagcaaaataataagagtagaaaattttcacaaggactcaaaagcaaataccctcactcactaccccatatagaactaatccttgaaaaccataacagagaaaatgaaatccgtgcaatgaacagatttttattttcctgggaagtcactagactgcctcacaaggacaggaaccatccattttgtgttcaccactaacttgccattattatggcaaatcttggaacacaagacatgcttaagaacaactatttgctgcattacgaaagaagaaggaacaaggccagcctgctccatcaaggttaagtttctaaagttctccagcaacatgtctctgtacaggttttcccaaacaaagtccagtaatacccactcctccaacaataagtctactgccatttacttgaaggtcaaggagttctaaaacatcactcatatattctggctcaggcaatgagcatcttcaagaatgtaccaggatggatatcgcaggaggatgatggatgggctggtagcactagggaaggagactcaaaacaggaattcagacatgttcttgaggccacttattatctgccccatgactaacttctctcctcttttacccacagacactgaaccaccttctagatagaagctttaatggcttcactagcatatagttgacctgatttttccagtatgttgtaaaaactcatccagtggccaggcatggtggctcatgcctgtaatcccagcactttgggaggctgaggtggttggatcacctgaggctgggagtttgagaccagcctgaccaacatggagaaaccccatctttactaaaaataaaaaattagcctggcatggtatctcatgcctgtaattccagctacttgggaggctgaggcagtagaattgctcaaagctgggaggtggaggttgtggtgagccgagattgcactattgcactccaccctaggcaacaagagtgagactccatctcaaaaaaaaaaaaagggaggggagtaggggagaatgaatattgagaagacaactagctattatttgacctgcgaggtcagagagaattttcttataaataagaataaagaggccaggagtggtggctcacgcctataatcccagcactttgggaggacgaggcaggtggatcacgaggtcaagagatcaagaccatcctgaccaacatggtgaaatcccatctctactaaaaattagctgggtgtggtgatgcacgcctgtagtaatagctgtagttccagctactcaggaggctgagtcaggagaatcgcttgaacccaggaggtggaggttgcagtaagccaagattgcaccactgcactccagcctggtgacagagcaagattccacctcaaaaataaataaataaaagaataaggaagctgagcgcgatggttcatgcctgtaatcccagcactttgggaggctgaagtaggtggatcacctgagttcaggagttccagacatgcctgtcaccccaatatggtgaaaccccgtctctactaaaaatacaaaaaattagacaggcatggtggcacgtgcctgtaatcccagctactcaggaagctgaggcaggagaatcacttgaacctgggaggcagaggttgcagtgagctgagatcatgccattacactccagcctcgacaacaagactaaaactctgtctcaaaaaatatatataaataaaaataaagggccaggcgcagtggctcacacctgtaattccagaactttgggaggccaaggtgggcagatcacgagatcaggagatcgagaccatcctgaccaacatggtgaaacaccatctctgctaaaaatacaaaaattagccaggcgtggtggtaggcatctgtagtcccagctactcgggaggctgaggcaggagaattgcttgaacccaggaggcagaggctgcagtgagctgagatcgcgccactgcactccagcctggacaacagagcaagcctcagtcttaaaataaaataaaataaaataaaggccaggtgcagttgcttatgcctgtaatcccagcactttaggaggccaaggcaggaggctctcttgaggccagtggttctcgaccagcctgtgcaacatagtgagacccccatctctatttttttttttttttgagacagaggctcgctctgtcgctcaggctggagtgcagtggagcgatattggctcactgctagctctgcctcccagtttcacactattctcctgcctcagcctcctgagtagctgggactacaggcaccccacaacgcctggctaatttttttgtatttttttagtaaagacagggtttcagtgtgttagcaagatggtctcgatctcctgacctcgtgatctgcctgcctccgcctcccaaagtgctgggattacaggagtgagccactgtggccggccccccatcatctctatttttttttattttttttttaaagaagaaatgcgaccgctgagactgcatctatcccgcgagcacaaagccttgccctggccactctgccgcctatacacgcccgctgtcagctcaccatggatgatgatattgaggtgcttgtagttaacaatggctccggcatgtgcaaggtcaacttcgtgggcgacaatgccccccgggccatcttcccctccatcgtggggcatctgaagcaccagggcgttatggtgggcatcggtcagaaggactcctacgtgggtgaagatgcccagagcaagagaggcaacctgaccctgaaataccccatcgagcagagcattgtcaccaactgggatgacattgagaagatctggcaccacacctttttttttttttttttttttttgagacggagtctcgctctgttgctcaggctggagggcagtggcgcaatctcggctcactgcatgctccacctcccgggcttatgccattctcctgcctcagcctcctgagtagctgggactacaggcacccgccaccacacccgactcattttttgtatttttagtagagatggggattcactgtcttagccaggatggtctcgatctcctcacctagtgatccacccacctcggcctcccaaagtgctgggattacaggcatgagcctctgtgctcagcctggcacgacaccttctacaatgagctgcatgtttctcccaaggagcacccggtgctgctgaccgaggcccccttgaaccccaaggccagccatgagaagatgacccagatcatgtctgagaccttcaactccccatccatgtatatagccatccaggctctgctgtccctgcacgtggcctccagcttctccctgaagaagagattccagctgcctgacagccaggtcatcaccatcagcaacgagcggtccccgctgtcccatggcacttttccagccttccttcctggacatggaatcctgtggcatccatgaaactaccctcaactccatcatgaaatgtgacattgacatctgcaaagacctggatgccaacccagtgctgtccagtgacaccaccatgtacgctggtattgctgacaggatggaggaggagatcaccaccatggctcccagcatgaagaagatcaacatcattgctcctcctgagcacaaatattctgtatggatcagtggctccatcttggtctcgctgtcccccttccagcagatgtggatcagcaagcaggaatacgaggagtccggcctcagtattgtccaccctaccacaaatacttctaggcggacggtgacttacattataacctttcttgacaaaaacctaatttatgcagaaaataagattggttttttttttttttttttttggcttaagatttaaaacctggaatggtgaaggtgacagcagttagttggagcgaagaatcccaaacgttctacaatgtggctgaggactttgattatacattgttctttttttaaatagtcattccaaatatcgggaggtgcattctcttttttgtttttttgagacagagtctcactcagtcgcccagactggagtgcagtggtgcaaattggcacagtgcaacctccgcctcccaggttcaagcgattcttctgcctcagcctcccaagtagctgggattacaggtgcaccatcacacccagctaatttttgtatttttagtagagatggggtttaaccatattggcaaggatggtctcgaactcctgacctcatgatccacctgcctcagcctcccgtgctggcattacaggcgtgagccacctcgcccggctgggaggtgcattcttactggaagtcccttgccctcccaaaagccaccccatttctaaggagaatgcccagtcctctcccaagttcacatggggtggtgatagcattgcttttgtgtaaattatataaaattttttaaatctttgcctttgtatttttaattttgaatgatcagccatcatgtccccccatttttgtcccccaacttgagatgtataaaggctgttggtctccctaggggtgggtggaggaatggaggcagccagggcttacctgtacactgacttgacagcagttgaatgaaagtgcacaccttaaaaaaaaaaaaaggaaagaaaagaaattccatgtagacccatggtatgaccaattatcaatgacactagagaggactatctaaaagcatctattaataatccctcatgacagccaggtgaggtggcagaggttgcagtgagcagaggttgcacccctggactccagcctgagtgacagagggagactccatctcaaagcaaaaccaaaaaatccccaagttttgcagaatctggattttatggaaaaaaaaagaaaaaacaaaaacaaaaaaacttatcttggcagttaaacacacgctcactgttaaatgaacatataatgcaaatgagaaagtgtttacaactgcagtcatgaagaaagtgctaatttataaaatgtgcataacagaacaagtaatatattcagaaactctttcaaaaacaaatttaatcacataaaaccaccacagaaaactaaggggccacacgtcttatctgagaataggacaaacagaaagacaatttcatcttcatgtcatttatttgaatgtatccccaaaatgaattatcttatttgcaacaagagtgatacagaaaggcttccagagctgggcagggtgggtcatgcctgtaatcccagcactttgggaggctgaggtgggtggatcacctgaggttgggagttcgagaccagcctgaccaacatggagaaaccccgcctctactaaaaatacaaaaaaattagccgggcgtggtggcgcatgcctgtaatcctactcaggaggctgaggcaggagaatcgcttgaacctgggaggtggaggttgcggtgagccaagatcccaccattgcactccaaggctggatgcctggagaaacccagtggacacattcagctttcagcttattccaatcatgactgaagaggcccagccagaaaataagggtccccttgagccagcagcttagcttcaggtggagaaatgcatgataaaattatgataaagtttttccaaaagatgtagctgccaataggtaaagccacaaggctgctaatgtcaggctgctgcactcattccgtttccatttctatgtgaccagcgaagcttactgggacattcccttgctggtcactgaattctttggagatgtcaagcattcagtttcagaaagagattagtactacgtccctatctgatcttttttttttttttaagaggcagagtcttgctatgttgccccaggctggttgtgaactcctgggttcaggtgatcctcctgtcttggcctcccaaagtgcggagattacaggcatgagccactaggcccagcccctacctcaccttcttctttttttttttttttttttttgagatggagcttcgctcgtcgcccaggctggagtgcagtggcgcaatcttggctcactgcaacctccacctcctgggtttaaacaactttcctgcctcagtgtcctgagtagctgggattacacatccccaccatcatgcctggctaatttttctatttttagtagagatggggttttgccatgttggccaggctggtcttcaattcctgtcttggcctcccaagtagctgggattactggcatgcaccacaacacctggctaattttgtatttttagtagagatggggtttcaccatattgaccaggctggacttgagctcctgacctccagtgatccacccgccttggcctcccaaagtgctgggattagaggtgtgagccaccatgccaggccccctacctgaccttttaaagaagggacatgcttggtggctccgtcaggcagatattatggcgtgtgaaatatctaagggttgtatcccacttttccccttcccatggcttcacagcaatttacaatgcacaaaagaagccttatgaatgaacaaaggtgattccacttgatttacaagcaggtttctctccactgagtttctacaccttctataaggtatgaagtttttaaaagccctgccacgttccttttgtttctcttatttttcagtcaactttttcttgagacagggtctcattctgttacccaggctggagtgcactggcacaatctcggctcactgcaacctccacctcttgggctcaagtgatcttcccacctcagcctcctcagtagctgggactacagacgcacactaccatgaccagctaatttttgtacttttgtagagatgaggtttcaccatgttgcccaggctggtctcgaactcctgggctcaagtgatctgcccgcttcagccttccagagtgctgggattacaggtgtgagccactatgcccggcccacattccttatgatggggcttcaatccactctaagctcttccattttgtgcaagatcacgttctttgatttcatactacaagaaacctcttctttgtattcttttttctcatgtgagttttataagttctttcaccagatgagttcggatgctctaagggataataaaatggtttttcacatgccttagattcactgaaatggtctcctgtgtgatttcttacatttagcagaccaaagattgaaaagaggccaggtgtggtggctcatgcctgtaatcccagcactttgggaagccaaggtgggcagatcacttcagaccatgagttcgagaccaccctgaccaacatgatgaaaccccagctctactaaaaatacaaaaattagctgagcatggtggtacgtgcctgtaatcctagctactccagaggctgagagaggagaaatgcttgaacccaggaggcagaggttgcagtgagccaagatcatgccattgtactcaagcctgggcaacagagggagactgtgtctcacacacacacacacacacacacacacacacacacacacactacacagacagaaaacatttcattccttacattcataaggtttctttccattgtaactctgaacatgaatattaaagactatggaatatctaaaggttttctcacattctttactgtattattttgatagagttgaccaaaaaaaggaaccccacacattgaatggcttaaacaacagaaatttatttgctcataatttttgaggctggaagtccaggatcaaagtgtagataaggatgatttcctctataatgagccttaaaagaaggatctcctccaggaatctctctttgccttgaaggtaaccatttccggtcacttcacataaaattctgtgcctgctaccctggtatctctttcacttcttataaggaaaccagtcatattgaatgagggccccattctaactgcctcattttaaaatcacctctttaaaaaaccacatctctaaataccaccattatcttgaggtcccagggatgaaagccttaatgttaatgagtggatgggacatgtgacataatctaaatcagtggtcccctaactttttggcaccagggaccagtttcgtggaagacatttttcccacggactggagttggggattaaactgttccagttcagatcatcaggcattagattctcataaggagtgtgcaacctagatcccttgcatgtgcagttcacaataaagttcatgctcctatgagaatctaatgccactgctgatctgacagaaagttgagctcaggcagtaatgtttgctcatcctacattcacctcctgctgtgcaccctggatcctagcaggccacagaccagtaccagtccatggcccaggggtttggggatccctgacctaggccattccacttattatagtcatcaagttattctccagcatacattgcatatgaatattaaagcttgtggaacataaaagggttttcccacaatccttgaattcatagtttctctccagtttgtgttctaaaatgtttatcaaggactaagtggcaggcaagggctttcccacattccttacatcaatatggcttctctccactgggaatcctgacatacactttaaggcttgagaaataagtgaagattttcccacattccgtataaacataggttttctcctagtgggagttttgtggtatcagtcctatggattaaatgaagcctttcccatattttccatttacatagggtttcctgccactgtgaattcttacaagttcattatgacctgagataataaagaagtggttccagattcccaactctcacagcatttttctacaatgtgactgttcacatctttcatgtaaatgggaacaacagagagctttaccacaattctaacattgataagatttctctccagtgtgagttctttaatgacatggaaagggactgtaagaattgaagaactggctgggcgtgatggctcatgcctgtaatctcagcactttgggaggtcaaaccaggcagatcactggaggtcaggagttcgagaccagcctgatcaacatggagaatccctgccttcactaaaaatacaaaattagctgggcatggtggtacatgcctgtaatcccagctacttgggaggctgaggcagaataatcacttgaacctgggtgatagaggttgtagtgagccaagattgagccattgcactccagcctgggcaacaagagcaaaactctgcctcaaaaaaaaaaaaaaaaaaaaaaaaaaattcaagaatttatcatactacttatattcacagggtttctttaccatgtgagttcatatacttgaaatgaatttaaataactaggtttttcaacattgctttacattttcagggtttttcttcagtgagtttgtatgtggatattaaaaaggaaggattggctgggcgcggtggctcacgcctgtaatcccagcactttgggaggccgaggcgggcggatcacgaggtcaggagatcgagaccatcctggctaacacagtgaaaccccgtctctactaaaaatacaaaaaattagccgggcgtggtagcgggcgcctgtagtcccagctactcgggaggctgaggcaggagaatggcgtgaacccgggaggcggagcttgcagtgagccgagatcgcaccactgcactccagcctgggcgacagagcgagactccgtctcaaaaaaaataaaaataaaaataaaaataaaaataaaaataaaaaggaaggattatataaatccttttcaacatttcttatgctgaaagggcatctctccagagtaaattttcacacattcaataaggtttgagtaactagtgatggcttctctatattccttacattcatagggctctgtccaccatgagttcatgtttaagaaaggctgagcattgatgatgggtttttgttgttgttgttgttgttgttgttttgagacagagtctcactctgtcacccaggctggagtgcagtggcgtgatctcggctcactgcaagctccacctcctgggttcacaccattctcctgcctcagcctcccaagtagctgggactacaggtgcccgccaccacacccagctaatttttttgtatttttagtagagacggggtttcaccatgttggccaggatggtctcgatctcctgacctcatgatccacccacctctgcctcccaaagtgctgggattacagggttgagccactgcgcctagccttttatttatttatttatttttttgagacagtgtctcactgtttcccaggctggagtgcagtatcacaatctcggctcactgtgacctccacctcctggattcaagcaattcaggctggtcatgaactcccaacctcaggtgatccacctgccttggcctcccaaagtgctggtattacaggcataagccaccacacctggagttttagtcagagcttcagtgacctggaggaagggaaatatccaactccagccaactctatacatcctgacccaactaaagggtgggaaaaactgaagttcacagtgcagaagcacagactcactgcaagactgacatctaatccctggacaatagaatgctgcccctctccccacagcttatcatgattactagaggcctgcttacagcatttcctcttatccagtatgccatgtccagctaaggaaaaattacaagcatactaaaaggcaaaagttagtttaaagagaaagagtaagaaccagaaccagatatagcaggattgctgaaattatcagactgggaatttaaaacaattatgattgatatgccatgggttctactggataaagcagacagcatccaagaacagacaggcagtgtaaacacagagatggaaattctaagaaccacaaagaaatgctagaaattgaagacagtgtaacagaaatgaagaatgtctttggtaggcttattattggccaagaaacagccaactaaagagcttgagaatatatcagcagaaacatccacacctgaaaagcaaagagaagaataaaaaaacaagatataagaactgtgggataactacaaaagatgtatcctacatataaaggaaataccagatggaaagaaaaaaaaagggaaacaatgacagaatttctcaaaattaactcagacaccaaaacgcaaatccaggaggctaagcaaacaccaagaaggacgagcaccaaaaacctatacctaggcatatcatttaaaaataacagaatatcaaagataacaaaaaattttcatagaagccagagggggggaaatgctttaagtattgaggatcaagtataagaattacatccaactttgagcatagaaggaagaagtgaaggtaaaataaaaatgtttatttttctaatacttaattgatctgataacttctgaaaaatagctacaatgtattagattacatatgctaatttgtgtgtgtttataggcataaaagtgaaatatagtaatgatggaaggtctgagagggaggatttaggattattttgatagtataaggtactaacactactcaagaaacggtacagtattatcagaattcatgtacttattatggcatgtgaaatatttaaaggttataccatattccttaccttcccagggttctgaggtaattttacatgtgtaaaaaaaattctgtggaattaatgtaaggcttcctacatgcattacaggtaaaaggcttctctccagttcgacttcttacaccttctagaaggtagaaaacattaatgtaagcttttccacaatcctaatgggatttcagtccactccaagttccagtatggtgtatggggtcacattccttgcgttcacagtaaaagaaactttctttccttttttctcctctattttcacatggtctacgaccagacaacttgcatgtgaatattaaaatatagtgaacattcacaggctttttcatgctccttacattcatacaatttctctcctatgtgatttctcctgtatgtagaaaggactgaagactcaatgaaggctctcccacgtcttacattcatatagtttctctccagtgtggctttgcatgtgaatattaaggcttttggacaatctataaacgtttttgcttattgcttactgtattcacttgctagagccaccacaacaaaataccacagactgggtggctcaaacaagagaattttatttgttcaaagttctggaagcccaagatgaaggtgccagcagggttggtggctttgatagaaggatctgtcccagtgctctgtctttggcttgcagatggccatcatctgatgacttcacatcatcttctatttgttgtctcagttgtgtctttctcttcttatagggacaccaatcatattggattagggatgtactctaacagactcaatttaatcaaataattttcttttttttttttttttgagatggagtctcactccatcgcccaggctggagtgcagtggcatgatctctgctcactgcaacctctgcttcctgggttcaagtgattcacttgcctcagcctcccaagtagctgggattacaggtgcccaccacacctggctaaattttttgtattttcagtagagacaaggtttcaccatgttggccagggtggtctcaaactcctgacctcaagtgatccacccacctcagcctctcaaaatgctgggattacaggaattaagtaattttcatgcagcttcttctctccagagtgagttcattcatgtctttaaagtgaactggaacaaatgagagctttcccacatttattacatggacagtttctcactagtgaatttgttcatgtcttcgaagtgaacggggatgactgtaagctttcccgcattgctgacatttatagggtttctcttctgtgtgagttttttcatgaattctaaaggaactggaacacgtgaaggctttcccacactccttgcattcatagggtttctctccagtgtgagtcctttcatgtatttgaaatgaactggaatgactgaaggcctttccacattgtttacactcatagggtttttctccagtgtggattcgcatgtgaattttaaggtgggtggaatagttaaaagccttcccacattccttacaggtgtatggtttctgggcactgtgcgttcgcatgtgattattaagacatgagggatacccaaatactttcccacatatcttacactcacaggccttctcttcagtgtgagttctcaaatgtccactaagatttgaggaaactgcaaaggctttcccacattcaacacatacaaaaggcttctctccagtgtgagttcttatatgttgaataaggcgtgaggatgtaaggaaggatttcccacattccttacattcatagggcttgtctccactgtgagatcgtacatgcatactaaggcccgagtactgagtgaaggctttcccacattccttacatacatagggtttctctccagtgtgagttcttccatgtatctgaaatgagttggaataattgaaggctttcccacattccttacattcatatggtttctccccagtgtgggttcgcatgtgaatactgaggtaggctgggtatctatagccttttccacattccttacatttgtagggcttttttgcattgagggtttctataagcacagaaaggcttgtagagtcaataaaacctggcccataattcctccattcgtagagtttttctccattgtgagttctcatatgtgcctgaaggtatgactcattaatgaaggattttccacagtgactacattcaaatgacttttcttgtgtgctagttctctggtatacaatatttggtgtcaggctgaagattttttcactctgattaaactcagaaagtttctcaccagtagaggttttctcacacagggtaaggaaatcttttccatactgattacagtcatgagtgttccctgtactttgagttctcacgtgcgtcttaaggcatgagtgttcactgaagacttctccacattgctcacagtcacagagttcccttccattgtgttttccttcctgttgaagggatgatgatgatttaaggatttttctcaaacatattaacagaacatacccatctgaagctagaaacattataatggtgattataattgatgccatttttattacatgcattcaggtccttccctgtagatttattttaagtggtatgacttaactcttattctagaatgttgtgccatctactttaatcttggctaggcatggtgtctcatgcctgtaatcccagcactttgggagtccgatggggggcagatcacctgaggtcaggagttcaagaccagcatggccaacatggtgaaaccctgtctctactaaaaatacaaaaattagctgggcttggtggcacatgcctgtaatcccagctacttgggaggctgagacacaagaatcgcttgaacctgggaggcggaggttgcagtgacccaagatcacaccactgcactctagcctgggcaacaaagcgagactccgtctcaaaataataataataataataataacagatttctgtagaattcaatgtctagatgggtgcagtagctcacatttgtaatcccagcattttgggaggcaaaggtgggtggatcatttgaacccaggaattagagaccagcctgggcaacatggcaaaactccatctctataaaaaatatcaaaaaattagctgggcatggtggtgtgttcctgtagtcccaaccacataggaggctgaggtgggaggatcacttgagccaaggggtcaaggcttcagtgagccatgtttgtgccactgcaatccagcctgggtgacacagcaagaccttgtctcgaccaaaaaaaaaaaattcatagtctaagccagatgtggtggctcatgcctgtactcccagcacttttgtaaactgaggcagaggatcacttgagcacaggagtttgagactagcctgggaaacacagtaagaccctgtctccacaaaattttgaagaattagctgggtgtggtggtgcatgcctgtagtcccagctaccaagggaggctgaggtgggaggatcgcctgagcccaggaggtcaagactatactgagccatgattgcaccactgcactccagcctgggtgacagagcagtatctcgtttcaaaaaaacaccaaaacaaaactcaacgtctagttacacttgtgggaatgtgtgaaagctccaaagaaacaagtttcacaattggagcatccctaaattctttgctccctctcatgtgtatgcaacttctctcaaatatctcttatttttgctgacttcccataacagaattcctgattttctctgagggtggaaaataaaaaatatcctatgcaaatcttaccaattgtatcccaatggatgtctgacccctcaaaaagtcctgctgaagtatagaccactgggtttcaagtcgcatttcccatcctgaaataaaacagacaaacaaataaaaggactcaagctaggcacagtggctcatgcctgtaatcccagcactttgggaggctaaggcaggtggatcacttgaggtcaggagtttgagaccagcctggccaacatggcaaaaccccacctctactaaaaattcaaaagctagctgggtgtggtggtgagcacctgcaatcccagctactcacggggctcaggctggagaatctcttgaatccaggaggcagaggttgtaaggagctcagatcacaccactgcactccagccttggcaacaaacagagtgaaccacaacaagaacaaatgaaaggatttggagaaagaaatgcaaagagttcaaaacaatatggcttatttctatttgtttcaaattaaacatggcaagaaaaagcagaaagacatttggggatttgggctatatcaaaaatttggttttgatgtaaatgatccaaagggggaaaaattggccaagacaaggacatggggtaaaacttttcgatcgtttattacaaattgatgctatgaaaattaaaactgatagtgaatagagagaatcagggaatgaaagtaggaaatttctgaaaaaagagcgtatatctaaacaattaacttggccgggcacggtggctcatgcctttaatcccagcactttgggaggccgaggcaggcagatcacgaggtcaggatattgagattatcctggctaacacggtgaaaccccgtctctactaaagatataaaaaaattagccaggcatggtggcaggcacctgtagtcccagctacttgggaggctgaggcaggagaacggcataaacccgggaggtggagcttgcagtgagctgagattgcaccattgcactccagcctgggcgacagagcaagactccatctcaaaaaacaaaacaaacaaacaaaagccacaattaacttaaagaaatgttctaagaccccaggtggatgcctgaatcatggctagttctgaaccctgtacatactatgattcttcgatctggtaactgagatgaccgctacgtgactcacaggtggtgtacacagtgtagatacattggacaaaaggatgattcacaccccaggcaggatgacataagggttcatcatactactgagaatggtgagaaatttaaaacttatgttttgtttatttctggaaatttttctttttttcttttttttttttttttttttgtggggtgggggtcagtggccagggtctcactctatcacccaggctggagtacagtggtgcaatcacatctcaccacagccttgacctcctagtctcaatccatcctcacagctcagtctcctgagttactgggacagcaggtgcgtcccaccaccctcggctaatttttgtattttttgtagaaacaaggttctcggtatgttgcccaggctggtcttgaactcctgggctcaatgattcacccacctaggcctcccaatgtgtggggattacaggtgtgggccaccatgcctggccgagtttcccatttaatatttttggaccatggttgaatgcagataactgaaaccgtgaaaagtgaaatcacagacaaggggggactgctctgtaaataaaagcgtgtgggaagttaaatatttcctaactttctctaaaccttggggtttagagtgcagggagaaagtacatgttaaaaagtttcctaattatgctttcaaacatactgaacttctcatcaaccagagttgttcttcatgaacactcaccttggagaactcctccctgaactgtccttgactcttcttgttccaaccaagagattagactgggtttgatgatctgacctcctgagcacagagaaatacattaatggaagaggctcataaaaaagattacaaacctttctgtgattcaggaactacagatctaatgaaagtggtgaagctatttcaaaagggcgaaaaatgcaaataacaactctgactgtgccccaaacagtctggttacttctgtcccctaaaccgaaattcaggcttatgtacacatttaaaaagcactgagacttttattcaaacacaaaataatggccgagtgtggtggctcatgcctgtaatcccagcactttgggaggctgaggcaggtggatcacttgaggtcaggagttcgagaccagcctggccaacatggtgaaaccccatctcttctaaaaatacaaaaaaaaaaaaaaaatagctgggtgtggtggcgcatgccagtaatcccagctattcgggaggctgaggcccaagaatcgcttgaacccaggaggcagagattgcagtgagctgagatcatgccagtgcactccagcctgcgtgacagagtgaaactgtctcaaaacaagaacaacaacaaataaggaataaggaagtataacagagatcttcattcttctggggaaacaactaccccagtgttttttaaaacattattgtgcatcagagtcatccagagaacttgttcaaacacagattattgggcttcaactccaggtttctgggtggagaaggaaaatgtacatttctaacaggcagatggtgttgctattaatcttggaccacattttcagaatggtcacagtagattaaaatctatttaggacagggactatgtctctgttatttctctttgcattcagagttgacattgccaatgctgcaaaacagtaagtacaaaacatatcagttccatagaaggctgcaagggatgaggccagtcttacctactgtggccaggttcttgtagttctccagcatcacgtcactgtagaggcttctctgagttgagtccagtaaagtccactcctcctgggtgaagtccacagccacatcgtcaaaggtcactgaatcctaaagcatcacacacatgctggttggagccaagtaacaagcccatcagcgttcgctggaggatgaggaagggggacccaatgcctatgcaggattccaagggctgcagtgaccagccccaggttttaagggtcctagaaactcctcgcaccctaaacatactcactgtcatctcctccactcatagtgcattaatggcacttcttgaatatgaatttatctcagcacaaccagactaggagatctcttttttttttgaaatggactcttactctgttgcccaggctggagtgcactggtgcaatcttggctcactgcaacctccacctcccaggttcaagcaactctcctgcttcagcctcctgagtagctgaaattacaggcacacgccaccatgcccggctaattttttgtatttttagtagagatagggtttcagcatactggctaggttggtctcgaactcctgacctcatgatccgcccccttcagcctcccaaagtgctgggattacaggcatgagccactgtgcccgcccaagatctcatcttatttccatctatttgagcgcattgctcagcacattccagacatctgatcaatgctgataaacaacttaaaggacacttttttttttaatttttttgagacggagtcttgctgtgttgcccaggctagagtgcagtggtgcaatcacagctcactgcagcctcaacctccagggctgaagtgatcctcccacttcagcctccaaagtagctgggagtccagtcatgtaccactttgcccagctaatttttaaattttttgtagagacggggtctcactatgttgctcaggctgatcttgaactcctgtactcaagcaatctgcctgcctcagcctcctaaagtgctgggattatgggtgtaagccaccatgcccggcctgggatgatttccaagttagcacctccctatatgggtggccccaacccttggggaaattcaaatggggattcagtccttgagtgacactttatttgctttaagaagcctggagaccggagcttgcagtgagccgagagcatagcactgcactccagcctggcaacacagcgagactccctctcaaaaaaaaaaaaaaaaaaagaagtctggagacaactctgcctagagggaaatgtgtctacctggtggatgcaagtatgtcactatgtataagaatacagctgctttttacctgataacaatctgttaggcagtcagccactattcttcctgctggtgtcttttcttcatgaaggcaaactgggtccccagaaagataatgtcctgtaagaaaatgaaggcaagagaaccccgagctgaccataatccccacatccacctacctagaggtcattacctcctagtatgaaattcccatatattcctgcaaaatcaggaaaacacacataaggccagttgcagtggctcacatctgtaatcctagtgctctgggaggttgaggtggaaggattactttaggcgagaagtttgagatcagcctgggcaacacggtgagaccccgtctctacaaaaaaattttaaaatgagcctggtgtggtaacacacacctgtagtcccatctccttggggaagctgaggcaagaagattgcttaagcctaggagttcgagactaccctggacaacacagtgaacataaactccccatctctacaaaaaaatttttttaatcagccaggcatggtggcatgtgcctgcagtcccaggtacttgggaggcagaggtgggaggattgcttgagcccaacagtttgaggctgcagtgagctatgaatgcaccactgcactccagcctggacaaaagagcgagactttgtataagaaaaaaaaaaaaaagaaaagaaagaaaatgcaaacatacaacctactaccatacaatgccagagcagtcctaaacgtgatgatgagctgtgctgcccatcaggaaaagtacaatagtctcatttcacacataaggaaacatatacccagagcatgggactctatcatgctgattagaattcatgaaggagattatgcagtacctctttccaaaattcacaggcagagcctgactcacaagacagcacgttctggcacccctcagcacctcccaaatgaatcagcaacatgaccagctgcccaaaccactagaccctatattgtgtaaagggaacctagaacaggatatcctaaaaagagcaacagagcttaccatgggacaaatcagcagctgccatcccgcgaggtgagaacgtgtcagaaccctcctttcattgatgtcaccatcacttcaggacacctcattaatctaaatggacagtggcaatctccattcctctttaaacagggttattgggattcctgttggtattaatcaataatcaacaagcagtacttaatcatcagccatcaaacatatacaccggctggggcagtagctcatgcctgtaatcccagcattttgggaggccagggtgggaggactgcttcagcctagaagtttgagaccagcctgggcaacatagcaagaccctatctctaaagaaacaaaaataaaaataagtaaacaaacaaaaaaaaatgaagtggtaaaccagaacctgaatgcaagtacaagttttgcacacacacatagaaaaaataatctcacaatacacttttaagtattgggtagcctcaactgggccttgattggaaacactcaaatcaaatctgcatccccagctcacactgtcagagaggcaaggccaaaccactctgtgcctaacactggtctgttttatgggtcttcaaagagaactaccttttcatagtatttatctggttaatttttttccaccaaagtttggttttatttggctgggcagggtggctcacgcctgtaatcccagcactttgggagcctgaggccagaagatcatgaggtcaggagttcaagaccggcctaaccaacacggtgaaactccatctctactaaaaatacaaaaattagccgggcgtggtgtgcggctgtaatcccagctactcaggaggctgaggcaggagaatcgcttgatcctgggaaatggaagttgcagggagctgagatcacaccactgcactccagcctaggtgacagagcaagactctgtctcaaaaaaaaaataataataataataatgacaatcattaattaatcaaacatgaaacagtggctcaaacaatcacctacagaatgggagtcaaatgatgataaacagtgaaagttccgcagttcattatccatgaaccaaattcacaaaaactctataggcctccttctaccaataagactaaaaccctaaagtcacaaaaaccacagttctggactcctggtatagatcacacctactcccaggggtctcaaactaggggtcctagggctgactaggcccacaaatattcagtttggtggcatctgtatagaatatttaactctttttttttttttttttttggagagatggagtcttgctatgttgcccaggctggtcttaaactcctgggctcaagagatcttcctgcctcagcctctcaaagtgctgggatcacaggtgtgagccactgtacccagccagctttttttttttttcattgatatacaatcaatgtagcttaaaatgcacacatccttcgtttctcttttttttcttttgagacggaggctcactctgtctcccaggctggagtgcagtggcacgatctcagctcactgcaacgtccgcctcctgggttcaagtgattctcctgccttagtctcccaaatagctgagattccaagaccccaccaccacgctcggctaattttttttctatttttagtagagacggggtttcaccatcttagccaggctggtttcaaactccttaatccaaccatcctgttcattgtaaatttgattattgtgatactagaataataaagccttcatcctttccctctggaggtctgattaagaagctctcttgggatgtacaggcctaggaactccattcgaagataatgaattattattcttagtattctttagcagaaagacttgcggtctacaaacgtttatattcacatacacaaatacgcacaccctataaacctaaaaagcatctttatctttcgccatgaaagtaatggtcaaaaataaaacacaacacaataagacgaaaccaaacttacagatgaaacattcgtttgcataagagaagacagaaaaggccccctagaaccaactttcacccagtgctcaccggaacactcagaaatcgccaggtccctgaaccgggaagatcctggggacggagccaacgcggatgcaaaaggcagcaattattttcctgccggaaaaaaattcacaaacgctgctttggaggcctttggagaggggcgcacagatgaaaacaccctgcggacaccgtaactataaacccgactcctcccgaggagcgacggtccgagcggacgctagcgggcccagcagacacgagcagagcgggccaggcctctctaacgtccgggccaaacccgtccttcaccccaaaaccagttcatctcctcggaactcacccaggccagtgaggccttaactctgaaaggcaaaaagactctcaggcgctcacagccggcgtcacaaaaggaacggcgcaccgctgacgtcatttacgctctccgcctcgggccaggcggggtttcgggactagggtttctgccgtgtaatacctcctcgaggcagaaaaattctactttccatctgcttggctgcggaggaccttggggtgggctcagcgtgggggctgcaggcagaaatgggtccagaaggcaaggtcgaggttagagccaagcctgtgggcagggctacgggcagggggcggggaggaatgtgggtccaggcccagaggaaaaggttgaagttatagccaggcctgtgggcgaggccgcagcagggcggccataggggaaggagccaatgtgttatgcatgtagaaaataggtaactacgtcttttgctctgttactatttcaacatttgatgtaaaaaacattttctatgcagctaaaagaattgtttttaaaaataatttctaggttttctgccttgctttaaaacatcttttctttttttttgagacaaaatctcactctgtcaccaaggctggagttcagtggagccatctcagctcactgcaacctccacctcccaggttcaagcgattctcctgcctcatcctcccaagtagctggaattacaggtgcatgctgccacaccctgctaatttttgtatttttagtagaggcagggttttgccatgctggccaggctggtcttgaactacttgtcaggcctctgagcccaagttaaatcatcataaaccctgtcacctgcacgtatacatccagatggcctggagcaactgaagaaccacaaaagaagtgaaacagccagttcctgccttaactgatgacgttccaccattgtgatttgttgctgccccaccccaactgatctcttgaccttgtgacattcttcttctggacgagtctcaggagttccccaccgagcaccttgtgacccccggccctgccagcaaaagataaccacctttaactttccactacctacccaaatcctataaaactgccccacccctatctccctttgctgacccctttctcggactcagcccacttgcacccaagtgaataaacagccttgttgctaacacaaagcctattggtggtctcttcacatggatgtgtgtaacatttggttccgaaacctgggacagggggactcccttgggagactggccccgtcctcaccctcactccgtgaggagctccacctactacctcgggtcctcagactagcccaaggaacatctcaccaatttcaaattgggtaagcagtctcttcactctcttctccagcctctctcactacccttccatctctctgtccttccaattccagttctttttcctctccagtagagacaaaggagacacattttatctgtggacccaaaactccagctccagtcacggactcaggaagacagtctttccttggtggctaatcactgtagggatacctgcctgattattcacctacattccattggtgtctgatcactgtggggatgcctgccttgatcattcacccacattcccttggtggcaagtcaattgcagggctgcctgctttggctgcttacccacattacagcccagggctgctcacccccaccccactccactgccttctccatgtctctacctttctctttaaacttacctccttcactatgggcaatcttctgccctccattccctgttcttctcccttagcctgtgttctcaagaacttaaaacctattcaactcacacctgacctaaaacctaaataccttattttcttctgcaacaccacttggccccagtacaaacttgacaatggttctaaatggccagaaaatggcacttttgatttctccatcctacaagatctagataatttttgtcataaaatgggcaaatggtctgagatgcctgacatccaggcattctttacacattggtccgtccctagtctttgctcccaatgtgactcatcccaaatctttcttgtttctttcttgtcctttgaatcctccttttctatggacccatctgacctctcccctccccctcaggctgctcctcgccaagctgagccaggtcctaacgtatccagaattggtgggttcttggtctcactgacttcaagaatgaagccgtggaccctcgcggtgagtgttacagttcttaaaggcggcgtgtctggagtttgttccttctgatgttcggatgtgttcagagtttcttccttctggtgggtttgtggtctcgctggctcaggagtgaagctacagacctttgcggtgagtgttacagctcttaaaggcagcatggacccaaagagtaagcagtagcaagatttattgcaaagagcaaaagaacaaagcttccacagcgtggaaggggacccaagggggttgccactgctggctcagtagcctgcttttattctcttatctggccctacccacatcctgctgattggtagagccgagtggtctgttttgacagggtgctgattggtgtgtttacaaaccttgagctagatacagagtgccaattggtgtttccacaatccctgagctagacataaaggttctccacatccccaccagactcaggagcccagctggcttcacccagtggatcccgcactggggctgcaggtggagctgcctgccagtcccgcgccatgtgcccgcactcctcagcccttgggtggttgatgggactgggcaccatggagcaggggggagctctcatcagggaggctcgagctgcacaggagcccatggagggggtgggaggctcaggcatggcgggctgccagtcttgagccctgccctgtgggaaggcagctaaggcctggcgagaaatcaagcgcagcaccagtgggctggcactgctaggggacccagtacaccctgtgcagctgctggcctgggtgctaagcccctcattgcctggggccagcagggccggccagctgcttcgagtgcagccgccaagcccacgcccacctggaactccagctggcccgcaagcaccatgcacagccccagttcccgctcgcgcctctccctccacacctccctgcaagctgagggagctggctccagccttggccagcccagaaaggggctcccacagtgcagcagtgggctgaagggctcctcaagtgccgccaaagtggaagctcaggcagaggaggcgccaagagtgagcgagggctgtgaggactgccagcacgctgtcacctctcactaattcttcctcagcctctgctccctaccctgtgatctttctatcacctccccttctcacacccggtccagcttacagtttcattccatgactagccctcccccacctgcccaacaatatcctcttagagaagtggctggagctgaaggcatagtcgaggttaatgctcctttttcttcatccaacctctcccaagtcagttagcatttaggctctttttcatcaagtataaaaacccggcccagttcatggcctgtttggcaacaacccttagacagtttaccaccctagaaccagagaggccagaaggccatcttattctcaatatgcattttattctcaatatgcattttattacccaatctgctcccaagactagaaaaagctccaaaaattagattctgaccctcaacccccacaacaggacttaattaacctcaccttgaaggtgtacaataatagagaagaggcagccaagtggcgttgtatttctgagttgcaattacttgcctctgctgtgagataaaccccagccacatctccagcacataagaacttcaaaatgcctaaaccacagaggccaggtgttcctccaggacctcctccctcaggttcttgctttaagtgctggaaatctggccactgggccaaggaatgcccgcagcccaggattcctcctaagccatgtcccatctgtgggaccccacttgaaatcggactgtccaactcacctggcagccactaccagagccactggaactctggcccaaggctgtctgactgactccttcccagatcttctcggcttagcagctgaagactgacactgcccgatcacctcgggagcctcctggactatcacagatgctttgggtaactcttacagtggagggcaagtctgtccccttcttaatcaatacagaggctacccactccacattaccttcttttcaagggcctgtttcccttgccttcataactgccgtgggtattgatggccaggcttctaaacctcttaaaaatccccaactctggtgccaacttgaacaactttcttttatgcactctttttagttatccccacctgcccagctcccttattaggtcaagacattttaactaaattctctgcttccctcactattcctgggctatagccacacctcattgccacccttttccccagttcaaagcctcctttgcctcctccccttgtgtctcactaccttaatccacaagtatgggatacctctactccctccttagcaactgatcatgcaccccttatcatcccttgggggtaaaacctaatcacccttaccctgctcaatgccaatatcccatcccacaacaggatttgaggggactaaagcctgttatcacttccctgttacagcatgaccttttaaagcctacaaactctccttacaactctcctatcctacctgtccaaaaactggacaagtcttacaggctggtccaggatctttgccttatcaaccaaattgtcttgcctatccaccccatggtgccaaacccatatactctcctatcctcaatacctccctcctcaacccattattctgttctggatctcaaagatgctttctttactattcctttacacccttaatcccagcctctcttcactttaacttggactgaccctgacacccgtcagtctcagcaacttacctgggctgtactgctgcaaggcttcagggacagcccccgttacttcagtcaagcactttctcatgatttactttctttccatccatctgcttctcaccttattcaatattttgatgacctcctactttatagcccctcctacaaatcttcccaacaggacaccctccggctcctccaacatctattctcaaagggatatcgcgtatccccctcaaaatcccaaatttcttcttcatccgttacctatctcggcataattcttcataaaaacacacgtgctttccctgctgatcatgtctggctaatctcccaaaccccaatgccttctacaaaacaacaactcctttccttcctaggcatgcttgggtactttcacctttggatacctggttttgccatcctgactaaaccattatataaactcacaaggaaacctagctggccccatagatcctaaatcctttccccactcctctttccattccttaaaaacagccctggaagctgctcccacactagctctccctaactcatcccaacccttttcattacacacagccaatgtacagaactgtgtggttggaattcttacacaagagctgggaccacgccctgtagcctttctgtccaaacaacttgaccttactgttttaggcttgccctcatgtctccatgtggtggctgccaccactttaatacttttagaggccctcaaaaccacaagctatgctccatttactctctacagttcccataactttcaatatctattttgttcctcacacttgacacatatactttctgccccctggctccttcaactgtactcaccattcgttgaatttcccacaattaccattgttcctggcccagacttcaatccggcctctcatcttattcctgatactacatctgaaccccatgattgtatctctctaatccatatgacattctccccatttccccatatttccctgtttcctgttccccacccagaccacacttggtttattgatggtagttcttccaggcccaatcaccaatcactggcaaaggcaggctatgctatagtgtcttccacatctatcattgaggctatggcccttcccccttccactgcctctcaacaagctgaactcattgccttaactcgagccttcactcttgcaaagggaatacgtgtcaatatctatactgattccaagtatgccttccacatccttcaccaccatcctgttatatgggcagaaagaggtttccttactacacaagggtcttccatcattaatgcctcctcaataaaaactcttcttaaagctgctgtacttccaaggaagcttgtttcattcactgcaagggccatcaaaggacatcagatcccattgctcaaggcaacaattatgctgataagggagttaaagaagcagctagccttccaacttctgtccctcatggccagtttttctccttctcatcagtcactcccacctactctcccactgaaacttccacctatcaatctcttcccaaacaagacaaatggttcttggatcaaggaaaattcctccttccaccctcacagcctcatttcattctatcttcctttcgtgacctcttccatgtgggttacaagccactagcccacctcttagaccctctcatttcctttccatcatggaaatctatcctcaaggaaatcacttctcagtgttccatttgctattctaccactcctcagggatttctcaggccccctccctttcctacacatcaagctcaggggttcacccatgcccaggactggcaaattgactttatccacatgccctgagtcaggaaactaaaatattcttggtctggtagccactttcactggatgggtagaggcctttctctcaggcctgagaaggccaacgtggtcatctcctcccttctgtcagacataatttctcgatttagacttactacctctatacagtctgacaacagactggccttcattagtcaagtcactcaagcagtctctcaggccttgggcattcaatggaaacttcatgccccctaccgccctcagtcttctggaaaggtagaaaggaataatggtcttttaaaaacacacctcaccaaactcagccttcaacttaaaaaggactggacagtatttttaccacctgccctcctcaaaatttgagcctgtcctcgggatgctacagggtacagtccatttgaacttttatatggacataccttcttgctgggccccaacctcattccagacaccagccctctgggggactaccttccagtcctccagcaggctagacaggaaatttaccaggctgctaatcttcttttgcctactccagattcccagccatatgaggacaccctagctggacgatcagttcttaagaatctgacccctcaaactctacaaactcggtggactggaccccacttagtcatctatagtactccaatggccatccatctgcaggaccctgcccattgggttcaccattccaggataaagctgtgcccatcggacagacagcctgatctctcctcttcctcctggaagttgcaagtactcacccctacttcccttaaactcacccgcatttctgaagaacagtagtgacacttgtgagcctaatacaccctttcattttgttaggtctattcttccttaccctgatctttacaacagggcttcacacagtcacccccactacttggactgtaccccaaaacttttcatccctgctatcttctgtctagtcatactcctactcttcattctcacctacccataaatgtcctgcccttgtctacactgccagtttacactttttctccaaaccatcatagctgatatctcctggtcttagcccctaaccaccactcttaactcccccttggagtggatagatgacctttgctggcaaggcacactccaattctttcaccctgatgaagtccttttctttacttttcctcattcccattctcctgccatcctctacccctccctaattacctccaacatactatcaatctcgctcactccctcctcactctttctaatccctccttagtgaacaattgctggctttgcatttcccttttttcctgctcttacacagctgtccccaccttacataccgactgggcaacatctcctgtctccctacatctctgaacctcctttaacagccctcatctttacccttctgaagaacttctttactttctagacaggtctagcaaaacctcagacatttcatatcagcaagctgatgctcttctccgcatctacttaaaaaatctttatccttgattgaaaccatcctggctaacacggtgaaactcgtctctactaaaaatacaaaaaattagctgggcatggttgcaggcacctgtagtcccaggtactcaggaggctgaggcaggagaatcacgtgaacccaggaggcagagcttgcagtgagccgagatcgtgccactgcactccagcctgggtgacagagcaagactctgtctcaaaaaaaaaaaaaaacctttatccttatattaattctactccacccatatttgaacccctcacaacataaactactatccctgttgtcactcctttgtgcatctctcggcaaagactgactggaattcccctaggtaacatttcaccttctctatgcttcttcactcttcatctccaaagcccaactacacatattaccaaaaccaatggggctttttagctccacattatagataagccctctatcaatactggcaaacttaaaaacattagcagttactattatttaggaagacatttgtcctgcacttcactccatccttggctaccttccccttgttcttcagcctctcctcccagccccccttcttgtttacttatacacaaccccatgaatagcaatgaaaggttgcttgtagacactatgagttttctaatacaccatgaatactgaacctctccctctacccagttgccctatcaatccccattacaacttctaacggctgctgcccttgctgtgagaggtgacaacatgctggcggccctcactcactctcagcacctcctcagccttggtgtccacctggccacacttgaggagaacttccacccaccactgcactgtgggagcccctctctgggctggccaaggctggagccggctccctctgcttgcagggaggtgaggagggagaggcatgggtgggaaccggggctgtgctcggcgctcacgggccagcgcaagttccaggtgggccctgcacttggagcagtcggctggcaccaccagccctgggcagtgaggggcttagcacctgggccagcagctgcggagagtgcgccgtgtcccccagcactgccagcccacccatgccatgctcgaattcttgccatgcctcagccgcctccccacagggcagggctcaggacctgcagcccaccaggcctgagcccccctgtggtgggctcccacatggcccaagcttccccaacgggcgccaccccctgctccatggtgcccagtcccattgactgcccaagggctgtggagtgcaggcatggcatgggactggcaggcagctccgcctgcagcaggatccactaggcaaaccagctgggctcctgtgtcgggtggggacttggagaacttttatgtctagctagaagaccgtaaatgcaccaatcagcactctgtgtctagcttaaggtttgtaaacgcaccaatcagtgctctgtgtctagctaatctggtggggcttggagaacctttatgtctagctaaaggattgtaaatacaccaaccagcactctgtgtctagctcaaggtttgtaaatgcaccagtcaacaccctgtgtctagctcaaggtttgtaaacacaccaatcagcactctgtatctagctaatctggtgaggacttggagaacttttatgtctagctagaggattgtaaatgcacgaatcagcactctgtgtctagctcagggattgtaaacgcaccaatcagtaccctgtcaaaaaggaccaatcagctctctgtaaaatgcaccaatcagcaggatgtgggtggggccagataagggaataaaagcaggctacctgagccagcagcggcaacccgctcacatcctcttctacactgtggaagctttgttctttcactctttgcaataaatcttgctgctgctcactctttgggtccacactgcctttatgagctgtaacactcactgtgaaggtctgcagcttcactcctgaggccagcgagaccacaaacccaccaggaggaatgaacaactctggacaggaggaatgaacaactacagactcacagccttaagagctgtaacactcactgcggaggtctgcagcttcactcctaaagccagcaagatgacgaacccaccagaaggaagaaactccaaacacgtctgaacatcagaaggaacaaacaactacagactcacagccttaagagctgtaacactcactgcggaggtctgcagcttcactcctaaagccagcaagatgacgaacccaccagaaggaagaaactccaaacacgtctgaacatcagaaggaacaaactccagacacaccacttttaagaactgtaacactcaccttgagggtctgcagcttcattcttgaagtcagtgagaccaagaacccaccaattccagacacagctggatccctaggagtctgggtgcacctcttttggcgctccctctcatcttttcactttacatttccagttttgccttacacaagatctcttcttccctgtgactcctccacctacatgtgtctacctattaattggacaggcacatgtacactagttttccttcttccaaaaaatcgatttgcaaatgggactgaacagcatcctgttcccctcaggacacgaacacttcactacagttttgtttttcttattaatataagaagacaggaagaggcctcgacttactcactgctgaaaaaggaggactctgcatatttctaaaattagaatgttgtttttacctgaatcagtgtgccctgaattaagactacataaaaaactcaaaggtagagcccaaaaaactcaccaaccaggcacataattatgctggacctccctgggcactttctaataggatgtcctggctcctcccaattcttagtcctctaatacttgtttttctccttctcttattcagaccttgtgtcttccgtttagtttctcaattcatacaaaaccacatccaggccatcaccaatcattctatacaacaaatactccttttaacaaccccacaatatcaccccttttctcaaaatctttcttcagtttaatctctcccactctaggttcccatgttgcccctcatcccacttgaagcagccttgagaaacattgcccattatctctccatagctccccccaaaattttcattgccccccaacacttcaccactattttgtttttctgattaatataagaagactggaatgtcaggcctccaagcccaagctaagccatcataacccgtgtgacctgcacgtatatatgcagatggcctggagcaactgaagaaccacaaaagaagtgaaacagccagttcctgccttaactgatgaggttccacaattgtgatttgttcctaccccaccccaactgatctcttgaccttgtgacattcttctcctggacaatgagtctcaggagctccccaccaagcactttgagacccccgcccctgcccacaaatgataaccacctttaactgtaactttccactacctacccaaatcctataaaactgccccacccctatctccctttgctgactcctttctcagacttagcccacttgcacccgagtgaataaacagccttgttgctcacacaaagcctgttggtggtcttttcacacggacacgtgtaacactcctgacctcaagtgatctgcccaccttggcctcccaaagtgctgggattacaggcatgagccaccgcacctggcctaaaaagtcttttcaaactctagatgacagagatttcaatcttttcatttgaaatgtattactttaaaaatttatatgttttgttagggtgcaggggctcacacctgtaatcccagcattttgagaggccaaggtgcgcagatcacatatatgtgtatatacatatatatttttattggaatgtatttgggcatgtggtgtggagtagtggatccaattttatctcatccaaaaagagggccaatttttgtagcaccacttattgagagaaactgcctgatatggtttggctctgggtccccacccaaatgtaatccccaatgttggaagtggggcctggcaagaggtgattggatcatgggggtggtttctaatggtttatcaccatccccctagccctgtctcatgatagggttctcaggagaactggttgtttaaaagtgtgtagcacctccccctttgctctctctctcctgctccaccatgtaaagtcctgcctgcttcctcctcaccttccaccatgattgaaagtttcctgaggcctcccagccatgcttcctgtgcagcctgtggaattaaacctcttttcaaatttctttctaaattagagcagtgcaggaacagactaaggcactacatttgacctgctgatatgaaattctaccttattaattttttttttaattgggccaggtgcaatagctcatgcttgtaatcccagcactttgggaggctgaggtgggcagatcacaaggtcaggagttcaagaccagcatgaccaacatggtgaaaccctgtctctactaaaaatacaaaaattagctgggcgtggttgcacgcacctgtaatcccagctattcgggagggtgaggcaggagaattgcttgaacccgggaagcagaggttgcagcaagccaatattgcaccactgtactccagcctgggtgacagagagagactccatctcaaaaaacaattttttcatcattatggatacataatagttgtattcttaaattttttaaaactttgttactcctaattttatgacattaaacttttgaattattatggacacaattgtatccacctttttaaaacagtaattcttatatatacctgtatcagtttctagatccttctgtgccattcatagatttactcatgccaatcttattatattcctttgattccaatggttttatatcaaattttaatatttagttgtaaaaatataagggtagccaatgtttgttgacgattactcttatgggatctttgaggtgtcagttatcttcccctggaaatcctctgttgccagtggcaccttcacccaagttgaagaagaagaagaggagctttatttagtgttagagcagctcagaggagctgggtacggtggctcacacctgtaatcccagcactttgggaggccgaggtgtgcggatcacctgaggttgagagttcaagaccagcctgaccaacatagagaaaccccttctctactaaaaatacaaaattggccaggcatggtggcacatgcctgtcatcccagctacctgggaggctgaggcaggagaatcacttgaacccaggaggcagaggttgcggtgagctgagattgtgccattgcactccagcctgggcaacaagagcgaaattctgtctccagaaaagaaaaaaaaaaacaacagctcagaggagacccacagtgagtagctcccctctgtgggcaggcaggtcatttgtcgagtgtccagctctcagcagagaggaggcccttgggagggtagctcctctcctcaggcaagttgttcggtggtctctgcaggtctctgagggtctcagcagagacactagctcctctcttctgctagtggcactgtctgctcagctctggctgagccagggacatttagtgagcctcagagggcaggaagtgcatgccaattggcccatgggtggccatgggcgggcctggaaaaggcaccaattaccattccagttcatgggactggcagcccagccaccagccttcaggccgtccctggccagaaggaggaaccttaccagggacctacccctttccccctgggactctctcatgtctatcctgctgttcatggtgacccggcttggcctgactttgctccaagataggagggggcgtggacagcagggagaagccaggcagctggggcaggcattaaacattagccaggcacagtggtgcatgtctatagttctagctactcaggaggctgaggtaggaggactgcctgagcccagcaggctgaagctgcagtgagcagtgatcacactgaggtaggaggaataatttgactccagaggtggggctcagacctggacaaaattgaggactagctaaaacagggatggggcagaagcagctttccataagacacgcctaccagtgagccatgtcagtttaacattgccatggcaacacccaggagtttccacccctttccatggcaatgacccgatgaccaaagttaccaccattttcctacaaatttctgcataaactgccccttaatctacatgtaattaaaagtaggtataaatatgaccgcaaaactgccctgagctgctactctcagcacactgcctatgaggtttcccataggagtagtcacaaagctgtaccaccaccagagctgaaacactgcttcttcgataaagcttctttcttctaccaccagctcaccctgaattatttcctggccaaggccaaaaaccctcattggctaagtcccaatttgaagcttgcttgtcctacagcagcatgactgcactccagcctgggtgatggagtgagagcctggctcaaaaaatatactttatcaaacagaggtatattagaggtaagttaagatagaacagtttcttaattctgaaaaaaacaaaacatttgcgtaaagaacaatcttttgaataaaagtcataaaaacaggccaggcgtggtggctcatgcctgtaatcccagcactttgggaggctgaagcaggtagatcaactgaggtcaggagttcgagaccagcctgaccaacatgattaaatcccatctctacaaaaaatacaaaaattagctgggcatggtggtgggtgcctgtaatcccagctactcaggaggctgaggtaggagaattgcttgaacctgggaggtggaggttgctgtgagctgagatcatgacattgcactccagcctcagcaacagcgcatgactccgtctcaaaaaaataaaaaagaagcccaggcgtggtggctcatacctgtaatctcagcactttgggaggctgaggcaggaggatcaactgaggtcgggagttcgagaccaaactggccaacatggtgaaaccccacctctactaataatacaaaaattagccaggcatcttagcgcacacctgtaatcccagctactcgggaggctgaggcaggagaatcacttgaactcaggaagtagaagttgcaatgagccaagattatgccattgcactccagcctgggagacagagcgagtctctgtctcaaaaaaaataaataaaataaaataaaaagaatttgcatttggggaagtttgtcaaagatgttagaaggctcaaaacatttgattgaaacaggataacagctcacttgttagtaatccatgtaaatacagtgataatcaaaagtcattagtaggagtaaatagagttactaggaaaaaatgaatccttttaaagcccagagttttttgttgattctttttatttatttcaggggtagatgggggacagcgtctcactcagtggcccaggctggagtgcagcagcacaaaagttcactgcagcattgatctcccaggcctaagtgatcttcccacctcagcctccccagtagttgagactacaggcacacgttaccacacccagctaatttttgtatgtgtgtctttttttttttttttttttttaagagatgggctttcatcatgttgcccaggctggtatcgaactcctgaactcaagtgatcctcccacctcagcctctcaaagtgctgggattcaggcatgaaacaccatgcccaaccaaccaggtttttttttttaagtgataaaaaacttaataaaggcaatacaggaaattatctcgataatttcttgtaaaacctttcttagaccagctaccaaaaaggtaaagaaaaaccttctacagtgtgattatttctccttatgcaaagtgcatttagataacctggaagttggccaggcatggtggctcacacctgtaatcccagcacttgggaagccgaggcgggtggatcacttgggtcaggagttcgagaccagcctggccaacatggtgaaactctttctctactaaaaaacacaaaaattagccaggggtggtggcacacacctgtagacccagctaccaaggaggctgaggcagagaatcacttgaacccaggagacagaggttgcagagagctgagattgcgccactgaactccagcctgggtgacagagcaagaatccatctcaaaaaataaaataaaaataaaaataacctggaagttgaacgtgatgaaaagtgtgcttggatttagttaggaatatgtccaaggctatgagtgtaaaaatttaggtacatcaagaaaagccgagagtacagaatcaagttatacagagcaaatacattgcttttctaggccttcatgataaatatttcagtgtcaggccataatagccgatttagaaccaaagaaaaaacttacaggagcagacaaaaaagttggagacagtcatcatcccagaccttctcaatgtgaaaaaaagaaggcaatgatgtatgacctgcaaatgacatacactgagatgcaagtaaagttgagcctctgagacatgaatgagaaatctgaaaaaacaaaactctacctcaacaaattggctggttttggttttggtggctcgttcctgtaatctcagcactttggaaggatgaggcaggagagtaacttaaggccaggagtttgagaccagcctgggcaacatagctagatgccatctttattagtctgttctcgcattgttataaagaaataactaacagtgggtaatttataaagaaaaaaggtttaattggctcacagttctgcaggctggacaggatgtatgttgctggcatctgcttggcttctggggaggcctcaggaaacttacaatcatagcagaatgcagaggaccaggcatgtcacatggccgaagcaggagcaggagagagggggaggtgctactcacctttaaacgaccaaatcgagtgacaagaactcactcactatctatcacgaggacagtaccgaggcaggtagtgctaaatcactcatgagaaatccaccccgccatgatcaagtcacctcccaccaggaacaacctgtaacattgggaattacagctgaacatgagatttgggtggggacacatatccaaaccacatcatcatctctacaaatttttttaactgtatgaaattccacctcaataaataaaattactgttttaaatgatgaggacagcatttaaaacctgaaaactacagaaattaaatcgatctcaggaaaaaatgtggccgaaatagaaactagagtttagaagatggctactaacagattttagaacgaacaaacaaaacgtcttgcaaatttattaagtgcagataaatatgtcaaaaaaaaacacaccttcttgttttcaatatagaggaccagattctggtcctgtatcagtgcacccaacaccactgtttaatttttaggaaaaaaatatcctatgtacaatttcttttcaatcctagccaacacaatcatacaataaactgtcggtaaggcttatcttttataaatcctattcaaattgtttagacgtttaatcattttcttaaaccttcagtcttagacttacagttttctccttttatattggtacaaccaatcattttaccttaggacaaaaatttaccacataagattctcacacaaaaattactttttcctaaatttgtatttggagtaatagaccaaaatatatctactctttttagaaattttaagaagccagctgggcacggtggctcatgcctgtaatcccagcactttgagaggtgaaggcaggtgaatcacctgaggtcagcaattcaagaccagcctggccaacatggtgaaaccccatctctactaataatacaaaaattagcctgtcatggttgtgggcacctgtaaacccagctactcgggaggctgaggcagaattgcttgaacctgggaggcagagggtgcaattagctgagattacaccattgcactccagctgggtgatgagtgaaactccgtctcaaaaaaaaaagaaagaaattttaagaagccaagaatgaatatatattttttcagtaatttgtttgccttatatcttatttggatatgacccagataattaatattatttaagattttaaattacatgaaaagtttatttataaacatttattccatttacagttacctttaatttctaattacacctagattacttattaagatttgacacagctagtcattgttttaaattattttttattaaccaattttatatcctgttaatattgtttaccaaagttcaaaccctacactaaatacatggttattctgtcaataactcagaagatatagctattgttattaaatcaaaaatattaagtaaatctcacttataaaagaattgcacaaagatcattgttttagattgggtttagcttcatgaacttaaagtatctaatagagacagacacaacactgtcagaccagtaaacccagacaaaaatatatgctgacaattttgaagacatatctaattttatcgacaactttaaaaccaattaatttataaaagaattgtcatgtgaacttaaaaaaaattgtgttcatttttttatgaacacattttttttgatctgccctcctcggcctcccaaagtgctgggattacaggcaggagccaccatgcccagcctgatttctgtagttttatagtaacttttgacatcaggaagcatgagttgctcttttttaaaattgtttttaatactggggctccagttatgtgtgggctttcataacctaatttcagaactggcttaccagaacttctgccatattctggtggttacacatatcaatcatagtacagtatgagaggattacacaagggtagtcctcaaataccaggaagcagaaactggaggccaatttggaggctgcctagcacagagaatttgtcaatgtctaatatactacctatttaatccagcaatcctaattctaggaatttgtcctgaatgtaaatgcctaaatatacaaaaatacacatgctcaagaatactaactgcatccctgttagtaattgcaaatttgaattctctaattgatgacatgtagtagagcagctgaatattacatggtacatccacaaaaggagtattatgcagctacagaatgaaggtgaaaaaggaagatatatctatgaatttatatggagtggttatcaagatacactgttaggcaaaaatagaaactgcaagagtatagtatgaaactttttttttttggagacggagtctcactctgttgcccaggctggagtgcagtggcgccatctcggctcactgcaagctctgcctcccgggttcatgccattctcctgcctcagcctcccgagtagctgggactacaggcgcccaccaccacgcctggcaaattttttgtagttttagtagacagggggtttcatcgtgttacccaggatggtctcgatctcctgaccttgtgatctacccgcctcagcctcccaaagtgctgggattagaggcgtgagccaccgtacctgcctgaaatctttttttaaatgggcaataacaaatatatatatgttcatttttgctagaagaaaacacaggattattcagagaaaaaggttcattacctatagctgatgggataggaacaggttgtaaaggacagtgagattagaacagactggaaaggataaggcaagaaaaacgtttatgtttagttctaatgtttaaagtatgcaattaggtgggcgttgtggctaatgcctgttacaccagcactttaggaggccaggatgggaggatcccttaagaccaggagtttgaggccagcctgggcaacattgccacatcctgtctctacaaaaatttaaaattagccagtcctggtggtgcacgctggtagtcctacctactcaggaggctgagggagaaggactgcttgatctcagaagtgtgaggctgcagggagctatgactgcaccactgcactccaacctgggtgacagagcaacaccctgtctcaaaaaaaaataagggtaaaaaatttaaaaactgcctgcacctggtggtgcatgcctgtactcccagcctcttgagacactaaagtgggaggagtgcttgagctcaggagcataaggctgcagtgaggtacaatcatgccactgctctccagtctaggtgacacagcaagatcctgactcaaaaaaaaaaaaaaagataaaccagtataaaataaaacatactattgtttcacatattaatttttttgggacagtctcactctctaacaggctggagtacagtggcacaatctcagctcactgcaacctccacccccaaggttcaagcgattcttctgcctcagcctcccaagtagctggtattacaggtgggtgtcatgacgcctaatttttttctttgagacagtcacgctctgtcacttaggctggagtgcagtggtgcaatcttgactcactgcaacctctgcctctggggttcaagcaattctcctgcatcagcctccccagtaactggaactacaggcacccaccaccacggccggctaatttttctatttttagtggacacggggtttccctatgttggccaggctgatcttgaactcctgacctcatgatctgcccacttaggcatgagccaccacacccagccttttatttattttttttgagacagagtctcactctgtcacccatgctggagtgcagtggcacgatctcggctcactgcaacctccgcctcccgggttcaagtgattctcctgcctcatcctcctgagtagctgggactataggcgcctgccaccatacccagctaatttttgtatttttagtagagatggggtttcaccatattggccaggctggtcttgaactcctgaccttgtgatctgcctgcctcggcctcccaaagtgctgggataacaggcatgagccacggcacccagccgcctggctaatttttgtatttacggtagagacagggtttcaccatgttggccaggctggtctccaactcccagtctcaggtgatccgcccacctcggcttcccaaagtactgggattacaggcataagccaccatgcctggcctgttttacatatctaatttaaaaaaaaatcgacaaggataacggtgtgacacaaaatggaaaattaacaggaattactgaaatgaactttgtatcaaatggataaaaattcaacaatgaagaggggggtaaaaagcacaaaattgacccaagtaacttcttttattacaatttttattgtgataaaaacacataaaatttaccctttcacatactttgtgtgtaccgaagagtattgttaactataggcatatttttatacaacaaatctcaaaaagcttttccatcttgcgtggctgacactcaatacccattgaacaactcattttctcctccaccagcttgtggcaaataccgcagtactttgttcttctgagtttgacgttagataccccatataagtggaaatgggtgtatttgtcctttcggaactggtttatttcacttagcataacgtccatgttgtagcatatggcagaattttgtttttaaggctaaatgatattgcattgtatgtatataatgcattttgtttaccaattcatctgtcaatggacatttactttgcttccacctcttggctcttctgaataatgctgcaatgaacacaggtaggcattcacacattgagatgctttcttcagttcctttggacatgtacctagaagtggattgctgctgaccaagtaagttttaaacctagtgcttttatattacgccctgagctaaagataagaactgtgaataaaaactgaattctggttagttgatttttaaaaagagtggtatgagttatcaattctgagagtagcttatattttaatctaggattgagcacgtgctatttttgcaagtgatgaaagatagctacagacaagggaatttggaaagcaagaaataacccagcagtgctgcagtggaattaaaagtgttggcttgtggtcatgtttttaatatagaaatagagttattaatgtgtggatacgtatatataattttgtatgtctttgccatatcctccatagagaagacctaaaagccagggcactattacctaggaacacctccctacacagagactgcagcttctaaatagtattctccattaaaataaattacatttttctgagtctagggctggagacaaatgtaccatgaacaaactgttgcccagaaaataattatatacccatgaaataaggagaatacatttttaaagattcagaagatagcttgatggggatcctacttattgaatctggaaaaatatgtgcatcaaatttacagtagctaactacaccccatagattaagaatttatgatacatgctcctacaagtaaatgggtaaataaatgaataaggataactcttccttacaaaattccagttaagaaatgtagaagaaactatggaattagaaaatcactttttggactgggtgtggtggctcacacctgtaatcctggcactttgggaggctgaggcaggaggactgcttgagcccaagagcttgagaccagtctgggcaacatagtgagacctcggctctacgaataaaaaaattaagtgggtgcgttagcatgtgcctgtggtcccaggtactcaggagactcaggtgggaggatcgcttgagcccaggaggtcaaggctatagtgaggcatgatcatgccaccgcactccacaccctaggcaacagagcaagaccccaatgcagaccaaaaagaaaaaaaaaaaaaaggaaaagaaaaccaccatttggaaaccactacagcaacagctacagacatacctcatgttacttcactttgcttcatctcactttacagatatttttcacaagtagaagtcctgtggcaatgtcatgtcgaataaatctataacaccattttttccaacagcatgtgcttactttgtctctcacatcctgacaattctgacaatatttcaaacattttccttattattatacttactgtggtgctgtgtgatttttttttttttttttttttgagaaggaatctcactctgtcacctgggctggagtgcagtggtgtgatctcagctcactctaacctccacctcctggattcaagtgattctcctgcctcagcctcctgaatagctgggactataggtgcctgccaccatgcccggctaattttttgtatttttagtagagacggggtttcaccatggtggccaggctggtctcgaactcctgacctcatgattcactcacctcagcctctcaaggtgctgggattacaggtgtgagccaccgtgcccggctgctctgtgatctttgatgttcctattttaattgttttggggtaccacaaaccacaaccttcgaagacagcaaacttaacaaatgctatgttctcactgctccaccaactggccactctcccctctctcctcctcttcccaggcctcctaattccctgagggacaatattgaaattaggccaattcattaccccacaatggcctctaactgttcaagtgaaagaaggagttgcaaatttctcactttagatcaaaagctggaaatgattaacctcagtgagaaagtcatgtcaaaagccaagataagagccaggtgcagtggctcacacctgtaatcccagagtgttgggaggcagataggggagcatcacttgaggttttaagttcaagatcagccgggtaaacagtaaagtcctgcctctttaaaaaaaaaaaaaaaaaaaaaaaaaaattagctggccatggtggtgcacacctgcagtctttagctactcaggagacaggaagatcactggaacccgtaagtttgaggctgcaatgggctataactgtactacactccagcctgggcaaaagggagaccatgtctcaaaaaaaaaaaaaaaaaaaaaactgggataggccaaaatctaggcctcttgtgccagttagccaagttgtgaatgtaaagttcttgaaggaaactaaaagtgctactccagtgaacacacacataataagaaaggaaaacagcctcaccactaacacggaataagttttagtggtctggatagaagatcagaccagccacaacattcccttaagccaaaacctaatccagagcaaggccctaactctaattctatgaaggctgagaggtgagttagctgcagaagaaatgctggaagctggcaaagatcagttcgtgaggtttaacaagtcatttccataacataaaagtacaaagtgaagtagcaattgctgatgtggaatctgcagcaagcatttccagaatatctagataaatggcagaggtagctctactagagttttaacagagacaaaacagccttacttcaggagatgccatttaggactttcacagctctaggtaagctaatatctgacttcaaagattcaaaggacgggctgactctttactttgtagagacagcgtcacgctctgttgtgctggctggtcttgaactcttgacctcaagtgatcctccaacctcagcctcccaaagcactggaattacaggtgtaagccacttttcccagcctgggctggctttcttgttagaggtcaatgcagttggtgactttaaatgaatgctaatattcaattaccattccaaaaatccaagagccagttaagaattatgctacatctactcttcctgtggtatctatttacatctatttacagcatggtttactgaatattttaagcccactgtaaaacatactgttcagagattcctttcaaaatattaccactgataatgaacctactaaccaagagctcttatggaggtataaacaagattggcgttttcatgtctgctaaccgcagcccatggattctggaataattctgactttcaagtcttattatttaagaaatacatttcataaggctatagctgccactaataatgcttcttctgagggatctggataaattaagttgcagaccttgcagaaaggattctccattctagatgccattaacaacatttatgattcatggaaggaggtcaaaatatcaacattaaggcaggtgtggtggtgtgtgcctggagtcttggctactcaggaggcataggaaggaggatcacttgaggccaggagttcaaggctacagtgtgctctcatcgtgctggtgaatacccacttgtactccagcatgaacaacacagcgagaccttgtctctaaaaaaaatttttttaattaaaaaaataaaaaccaacattaaccagagtttggaagaagttgattccaaccttcataggtgactctgaggggttcaagtcttcagtggaaaaagtaactgtggatgtgatggaaaaaagagaactagaattagaagtggagcctgaagatgtgacagaattgtttcaatctcgtgaaaaaacttgaacagatgagaggctgctttgtatagataagcaaagaaagtggtttcctgaaatgaaatctactcctgaagatgctgtgaacattgttgaaaagacaacagacttagaatattacatcaacttagttgatcaagcagtggcgaagtttgagaggattaagtccaattctaaaagaagttccactatgcgtaaaatgttatcaaacagcgtcgaatgctaaagagaagtttttcatgtaatgaagagtcaatcaatgcagcaatcttcactgctgtcttattttaagaaactgccacagccaccctgatcaacagccatcaacactgaggcaagacctaccacaagcaaaaagattacaactcaccaaagtctcacatgatcattagcactttttggcaataaagtattttaaactaaggtactttacttagacataacacaactgcacacaagagactaccatatgatgtaaacctaacttatatgcactgggaaaccaaaacatttgtatgattcatgttattgtgatattcactttatagtggtagtctggaacaaaactcacaatatctacagggcatgcctgtatcttgtatcaatagggtttctcttctccattgcaacatcttatatacttagaaaggcctaaggaaataatgagggctttctgtgttttctacattgtatggccccatggtgagttctcaaatgttggattgtgaccacaatccaatcccttgagaaaagaatgtgtattaacaacgacttacaaaaaaaaaaaaaaaaaaaaaaaaaaaaaaaaaaggccaggagcagtggctcactcctataatcccagcactttgggaggccaaggcgggtggatcacctgaggtcaggagctcgagaccagcctggccaacatggtgaaaccccatctctactaaaaatacaaaaattagctgggtgtggttgacggcacctgtaatccaagctacttgaaggctgaggcagaatcgcctgaacccaggagacaaaggttgcagtgagctgggatcatgccattgcactccagcctgtgtgatgacaacagcaaaactctgtctcaaataaaataaaataaaataaaataaaataaaataaaataaaataaaataataaaaaaagattccattggctccctaacattcctaaaatttataggggacacatagagtatgagttctttcatgtcttcgaagtgaatggggataactgaaggcctcctcacattctttgtaccaataaaatttctcttcagtgtgaattcaaatgtggtaattatggtatgagaaattcctaaaagatttccacattccttacattcagagtttttcttcagtgtgtttttaaatgtttagtaagtaaataaaatctattgtaggctttcccacattcgttacatatatagggtttctctccagtgtgaattctaacatgtttctgtagatgtgaagaagcacggaaggttttcccacattccttacatatatacggtttctctccagtgtgagttcttatatgttcaatgagttgtgaagatgtagcaaaggctttcccacagtccttacattcatagggcttctctccagtatggatttttacatgattatgtaagcttgaggaaacagtgaatgctttcccacactccttacatttatagggttttattccagtgtgaattctaaagtgattcttaaggcatgaagagcttctgaaggattttccacataccttacattcaaagggcttctcctctgtgtgagttttaaaatgttcagttagtagataaaacctattgtaggctttcccacattcgttacattcatagggcttctctccagtgtgtattcgtacatgtttagtaaggcctgagcgcccagcgaaggctcttccacattccttacattgataaggtttctctccagtatgaattcttacatgttcaactaggtgtgaagaaacagtgaagcatttcccacattccttacattcatagggtttctccccagtatgggttcgcatgtgactattaagatatgaagaatatctaaagaattttccacattccttacattcgtagggtttttctacagtatgcattttaacagacacagcatggcttgtggagtaagtaaaagctctcccacattgcttctgttcatagagtgtttctccattgtgagttatcctatttgcctgaagatgtgactgatcaacaaaggcttcctcacagtcactgtattcaaaggatttgtctcctatccacgttctctggtgaacatttggtggcaggctgaaggcttttctgcactgattcaacacagaaagtgtctctccagcaggggcactgttgtgtaacatgggaaagttttctccatactcatcacagtcataagtgtcccctgtattttcagttcccatgtgtgcattaaggcatgagtgttcactgaagatttctccattttccataaagtcacagagttcccctccattgtggatttctgcctgttaataaagggatgaatgatgattaaaggatttttcagatttatcaacagattttacccatctgaaatcagacagtttattatgattataatttttgccattttcattacatgcatacagttgctgccccatgtatttcttacaagttgaatgaagaaaacctactggcaagaaccctgtgccatttgctctaagaaccttgaaataattcctgtatattttcatgaaattgtttttataatctagctacatatgtgataatttgtacttgtgagaatgctgaagcaccaagttttaagataggattaaggtatccccaaatgcattacatttagagtatccctctagagcagaggtccccaacctttttgctaccagagactgatttcgtagatgacaatttttccacaaacaggggtggaataggggtgggatagggatggtttcagcatgattcaacaacattacatttactgtgactttatttctattattattacattgtaatatataatgaaataattatacaactcaccataaaataggatcagcaggaggcctgagcttgttttcctgcaactagacagtcccatctaggtgatgggagacagtgacagatcatcagtctcataaggagcacacaatctagaaccctcgcatgggtggttcacagtaaggtttgtgcttctatgacaatcgaatgctgctactgacaggtggagtatatgacaggcagtaatacaagcgatggggaatggctatacacacagatgaagtttcgttcatctgccacttacctcctgctgtgcagcccagttcctaacactaacagaaacagtaccagtggggacccttgctctagagacattcctcctgcttgagtaaatgttacctctctcaaatatctctcatttttgctgattttttataattgaatcccaatctttttttgagtgtggtaaataagaaatcttaatcttaccatttgtatgccgtttgatgttttgttaagccaaaaaaaaatgttgttgaggtgctgacactttggttttaacttgccattctgaagtaaaacagaaaaaaagaaaaaaaaatagggtctgagaacaaaacagtaggttaaataagtcagaattataaagctcatttttatttgtcatattcagcacactcaaaaaaattaaacagacatagatttgaacagtttatccatgacgaacatttggcaatcgtaaggacttggggtctaaacttagtaattttttttttttttgagacagagtctcgctctgtcacccagactggagtgctggagtgcagtggcatgatctcggctcactgcaacctccacctcctgggttcaagcgattctcctgcctcagcctccgagtagcttggattacaggtgcccaccaccaggcccggctaatttttgtatttttagtagagacggggtttctccatgttggccaggctggtctcaactcctgacctcaaaagatccacccgcctcagcctcccaaagtgctgggattacaggcataagccaccatgcccagcaatttagtaattttttaaacaatttattctatagaaattaaatgagataatgaacagaaatagtattagggaaggaaaatagaaatgatctggataaagagcacacattaaagtcataaacaaaaagataaaagagcactcatttgcaaaatcacatgaaagtctgggttagatgaaaaagagaggaatatggaaagttgaagataccctaaaacttccaagtccaatggccccatgttctgtgacaaagtacatcttttaaatatatcttcattatgcttccaaacatactgaacttctcattgaccaggagtgttcttcatactcaccttggggaactccggttggcaatgtgctcaacttttccttctcctcctccagtcaagagacagactgagtttgaataggtcctgtacagagggaaagatacatcaatggaagaggcttatgaaggaaatgacaaacgtaaccaagaaaaaaacaactatattcctaaagagagtagtgaaactattttaaaagagctcaaatttcatatatctcatccttttgtgccctgaggagttggttatctctgaccaaatacccactattcagacttaaatacacatttaaaaaccattaaagactgggcgcagtggctcatgcctgtaatcccagaactttgggaggctgaggtgggagaatcacctgagcctggggaggttgaggctgcagtgagtcatgattgcaccactgtactccaacctaggtgacaaagtgagaccctgtcttaaaaaaaataaaataaaaaccattaaaacgtgtattcaaataggaaataatccaagtgcaaagagagatcattattttgttttctggttttgtttttttttttgagacagagtctcactctgtcacccaggctggagtgcaatggcactgtctcaactcactgcaacctccacctcccaggttcaagtgattctcctgcctcagcctcgtgagcagctggggttacaggcacccaccatcaggtctggctaatttttttgtatttttatagagacagggtttcaccacattggccaggcttgtcttgaactcccgacctcaggtgatccgcccacctcagcctcccaaagtgctgggattgcaggtgtgagccaccacgcctggccgagatctttttttttttttttttttttacgatatcgtcaaaagctcgaatattgtgtcttttgtagcttttcttatatcatgggtagtattacatctctctctctctctcttttttttctttttgagagatttttgctctgtcccccaggctggagtgtagtggcacaatcttcgctcactacaacctctgccgccgcccaccctagttcaagcaatacaaaaattagcagggcgtggtggcacgtgcctgtagtcccaaccactcaggaggctgaggcaggagaatcgcttttactcaggaagcagaggctgcagtgagccgagatcatgccactgcactccaggctgggcaacagagcaagattccatccaaaaacaaaagaatcagagagcttctttaggacacccctgaaataaagttatttcttatgttctcagggctgaaattgttataattaatgaggctcatatgccagagcttccctggcataatgtgaaggagggaatcctagagagacaggagtgttgcactggatttactatgtgtcatctgtatagcccactcccccgccctttgttgacagagcagaagacactctcttcacaaaggttattaagagagtagtggcgggagtgtcgtaatccttgaaaagctctgttggtattctccttcataggacaggtatgactgcaaagaataccatcactgagatgagttccctgggtttttttgtttgtttgtttgtttttgagacggagttttgctcttgttgcccaggatggagtgcaatgacgcagtctaggctcactgcaacctccgcctcctgggttaaagcgattctcctgcctgagcctcccaagtagctgggattacaggcacctgccaccacacttggctaattttttgcgaggggggggggtatttttagtacagacggggtttaaccatattggccaggatggtctagaactcctggcctcaggtgatctgcccgcctcagcctcccaaagtgctgggattacaggcgtgagccaccgcacccagccgagttccctgctttcaatcgagatgaaggggacccagaatagcagaaatcaagaaggtagtatttaatcaccaaacacaaggtgagaaaatcaactatcaaggacagtggaaatgtaccagtaatcagaatgccctgacctacagagatctgtggtggtggctaactgatcgtgctgtccctagaaatgaaatagataagcagttaacaaagcctactctaaagagccacaaaatatatgttaggcattatgggccacatggtctctgttgcagctactcaactctgctgttgtagcatggaaaataccatagaaaatgtaaacaaatgaacacggttgtgttctgattaaactttatatacaaaaaacacatggagagacagatatggcccatgggccatagtgtaccaatctctgtacttgaatactgctccatctatgtaaaaagtctaaactatagtagccaaaaactggatttatcccagtggagaatcataacctgtcactcaattaccacactgaaatcattcataaatcatgaacttaggtgatcactccaattaccgccatttttcaaaatgtaatgcctttactagataaatcaacataatttctgtcacttggtatgcaggcattgacatagctaatgtcttttctccataccaatttgaaaaaaacaagacttggttacctttcacctggcaggaccaacaatgtatcttcataacattgcccctagaatgtgtcagttctcgaggtctctgtcgtaacttaatccccagagaaaatgacattccatgaaacaccacactagtacactatgttgacaccattatactgatcatatccaatgaataggaagtagaaaacacatttttaaaaattagagacagggtcttactctgtcacccaggctggattagagtggcatgatcatagctcactacaacttcaaacttcaaactcccgggctcaagcaatcctcctgcctcagcctcccgagtatgtgggactataggcacatactaccatgcctggctaattgtttttctttttctttttactatagacatgaggtttcactacgttgcccaggctagtctcaaacacctggtctcaagcaatcctcccacgtcagcctcccagtgttaggattacgggcatgaatcattgtgccctgcctgaaaataccttagacaactttattagaagcatgcagcatttacggttccaaaatggtagtacagaagcaagctggtttcaatcccctgacagaaaactacaaccaaatgcatattgtgaaaattatcaccagcaatatccctgatctaaaatataaaaattaggcagtttctggggctacaaagaagtgaaaaaactccaagggagacgttaagagaatcaagtttccaagaatgtggaaaatttctaccaattcacagtttctacactggaaaaaactgagatcaatgtggacaaccaccttctccatcatcctgggttccctggtaaaagatcagtccctccctgtctcaacccacaggaagcattacaaatgcctgaagggagaaacatccctgaggacatccagggacaaagatgggaggcaggactaccatcccagccctggaaactctgttttataacttggccaaaggagaagccaagtcagagtggctgttcaggagcaccatactgtaggggtacgctacacaggtcacctgggcatgaacacacagccagccttcccacagtgctggaatatgccctttaggactccctcattctgaatgggcagtattcttgatagtttgctatagcaaaggcaaacgtgggtttaagattccatctagtgctgaaaacgaggcagtgacctagggaaattttaaagaaagaaaatcactttcggaggctgagacaggcagatcgcttaagctcgagttcaagaccagcaacaagatgaaaacccatctctactaaaaagtacaaaaagtagccaggtgtggtggcgtgcacctcacctactcaggaggctgaggtgggaggattgcttcagcctgggaggtagaggctgcagtaagccatggtcacaccacggcactgcaacctgggtgacagagagagaccttgtctcaaaacaacaacaaaaaagataaaaagaaaacatacccaataaaaaccacaagccagacaaagactgtaataaataactaatccttcaatgcacagacacagatgtacatccacaagaaacaacagcaaatggggaaccacgacctcctaaaatggacgaaaatagtatcagtgactgaacctaatgaaatgacaatatgtgagctccctaagaattcaaaataacagttttaaggaaattcagtgatctccaaaataacacagaagagcaactcagaaatgtatcagaaaaaactttagaatatattaacaacaacaaaaaagagaaatcttacaactgagaaatactcaactcaaaagttcacggtagaggctctcaacagcaagatggatcagaggaaagattcactgagcttgaagaaaagctatttgaaaatatagccagaagagaagaatgaaaaggaactaagattgtcggcaagatgcagaaaattaccttgaaagaccaaacctaggaatcactggtgttcaagagggaatgcagcaagtgcaaggggtaagctttgaaagctttattaaggaaataacaagattccaaaaattgagaaaaatataaatatccaggtacaggaaggtaagatgacaccaaacagattcaatccaaatgagactactacaaagcatacaatcttcagactctcaaaggtcaaggacaaagacaggaccttaaaagcattaagagaaaagaagcaaataacatgaaggactccagctggtctggcaacaggatttctcaagggaaaccacacacaggccagaagggagtaggatgacattttctttctttttttgtgagacggtctcactccgttgcccaggctggagtaccgtggcacaatcatggctcaatgcagcctttatctcccaggatcaagccatactctcacatcagcctcccaagtaactgttactacaaatgtgcaccacaatgcctggctaatttttctttctttcttttttttttttttttgtagagacggggcttcaccatgtttgaaatgcttgtttcccggtgccgtaaagaaatagcacttgaacataaattttatttctttagcaaggccattttaatttatttatacatttttttgagacagagtctcattctgtcgcccaggctgcagtgcaatggcgcgatctcggctcactgcaacctccgcctcccaggttcaagcgattctcctgcctcagcctccctagtacctgggattacaggcacattccaacatgcccggctcattttttgtattttttgtttttttagtagagacaggttttcatcgtgttagtcaggatggtctcaatctcctgatcccgtgatctgcccgccttggcctcccaaagtgctaggattacaggcacaagccaccgcgcccggccctagcaaggccatttttacactttctgcagaaagggtacactccccagcagatttgccatgagagtacaccgaacaaaggagacaggttcatttataacctgacgcatccaccctactgctgtgtccagtttccactggctggaatggaacctcacattttgtacttgttttgattggcttagaactttttaaaaggcgtaaaggcagaggagaagaaaggaaggaggaagtaacttgtggaatgctgagaaaggcaaaaacatcttcaaataaggaataggaacaggctatgacctaatgcttgcttggaccagtataagcatgccagggcaaatatttaggctaaattgtgggagctaagaacataaagtacattgatttctttattacagctagcagatatttaagtatgttaacacaggtctttgaataagttttgcttctaaaaagaagttatttattcctcattagatggaaaaaaaaaagtctttaaagaaaaatgtctactttactttttacaaccaagttgcccaggctggtctcaaagtcctgagctcaagcaatccaccaggctcagcctcacaaagtgctggaattacaggcatgggccaccttgcttagctatgggatgaaattttcaaagtgctggaagaaaaaaattgatatctaagaataccgtattcaggtcagcacaatgtctcatgcctgaaatcacaacactttgggaggctgaggtgggcggatcacctgacatcacgagttagagaccagcgtggtcaacatggtgaaacccagtctctactaaaaattaaaaaaaaattagcctggtatggtggcacatgcctgtagtcccagctacactggaggctgaggcaggagaatcacttgaacccaggaagcggaggttgcagttagccgatattgtgccactgtactccagcctgggcaacagagcaagatttcatttcaaaaaaacaaaaacaaaaagagataaagaaggtctctatagctgggagtagtggctcacacctgtaatcccagcactctgggaaggctgagatgggcagatcacgaggtcagaagttcaagaccagcctggccaacatggcaaaactccatctctactaaaaatacaaaaattagccgggtgtggtggtgtgtgcctgtaataccagctactcacgaggctgaggcaggagaattgcttaaacctgggagatggaggttgcagtgagctgagatcacaccactgcactccagcctgggcaacagagcaagactctgtctcaaaaataaaaaaaaaagaaggtcactatataatgataaaggggtcaattcagcaggaggatataacaactgtcaatatttatgcacccaacactggagcacctaagtatataaagcaaacattaataaatctaaagggagatacacactgcagtgcagtaataatagtaggggatttcaacaccccactctcggtaatggacagatcatccagctagaaaatcaacaaagaaacacagaagaagttaagcaataaactaaaccaaaaaggcctaacacaggacattttatccaactgctacagaagatacattcctttcctcagcatatggaatattctccagaacaggccatatcttaggccacaaaaaaaagtcacaacaaattcaaaaatgtagaaatcatatcatcttttctgaccacaagggaataaaactagaaatcactaacaagaggaaccttgattcacaggctcaaagtggtggctcatgcctataatcccggcactttgggaggccaacatggggagactgcttgcacccaggactttgagaccaccctgggcaacacaaggagaccctgtcccttcaaaaaaaaaaaaaattacacaacggaacattgttttggtacgttgacatatcaaaatccatggtacaaaagcacacagaaatttggaaattaaaatatttcttgaaacaaattaaagtgaaactacaacataccaaaatctatgggataaaagcagtactaagggagtattttacagcaataaacacgtacatacaaaaagtagaaagatttaaaataaccgaatgatacccttaagatactagaaaagcaaaaacaaatcagactcacaattaaatcaaaaggataaagaccacagccaaaataaacaaaattgagaataaaaaacaatacagaatattaataaaacataaagttgattacttgaaaagataaacaaaatcaaccaacctttggctagactaaggggaaaaaaaggacccaaataaaataaaaaatgaaaaaagaaaacagaacagaaaccacagaaatacaaccaatcattagaaactattacaaaaaactatatgccaacaaattgataagcctggaagaaatggacaaattattgggcgcatacaacctaccatgattgaaccatgaacaaacagaaaacctcaacacaccaataacaagattgaagccgtaacaaaatgaatcccatcaaagaaaagcccagaaactgatggcttcactgctaaatcctaccaaaaactgaaagaataacaatacaactcgaattcctcaaaaaaaattgaagagaagagaatatttccaaacttggtctacaaagtgagcattattctcatatcaaaagcagagaagagcacaacagcaacaaaactacaggccaggctgggtgcagtggctcacgcccgtaattccagcactttgggaggctgaggcgggtggatcaccttaagttaggagtttgagaccagcctggccaatatggtgaaatcctgtctctactaaaaaaaaacacaaaagttagctgggagtggaggcatgtgcgcctgtagtccctgctactaaggaggctgaggcaggagaatcacttgaacccgggaggcggaggttgccgtgagccaagactgagccattgcacttcagcctgggcaacagagcaagactccgtctcaaaaaagaaaaataaagaaaaagaaaaaaaaaagtaaccaaaaatgtgaaggagctatgcaaggaaaactataaaacactgatgaaacaaactgtagaggatacagaaaaaaaatgggaagatattccatgctcatggattagaatattgttaaaatgacaatactacccaaagcaatttacaattcagggcaacccttctcaaaataccagtgaaattcgtcacaaaaagagaaaaaaaatcctaaaatgtatatgcaatcacaaaagacctcaaacagccaaagaaatactgaccaaaaaaaacgaagctggagtggccaggtgcagtggctcacacctgtaatcccagcactttgggaggccgaggcaggtggatcattaggtcaggagttcaagaccagcctggccaacatgatgaaaccccgtctctactaaaaatacaaaaattagccagctgtgggccgggcgtggtggctcacgcctgtaatcccagcactctgggaggccaaggtgggcagaccacgaggtcaggagatcaagaccatcccggctaacatggtgaaatcccatctctactaaaaaaaaaaatacaaaaaaaaaaaaaaattagcctggcgtggtgcctgtagtcccagtggtgggtgcctgtagtcccagctactcagaaggctgaggcaggagaatggtgtgaacccaagaggtggaacttgcagtgagccggaacttgcagtgagcccagatcacaccactgcattccagcctgagtgacagaacgagactccacctcaaaaaattagccagacatggtggtgcgtgcctgtagtcccagctactagggaggctgaggcaggagaattccttgaacctgggagacagaggttgcagtgagccgaggtcgcaccactgcactccagcctgggagacagagcgagacttagtctcaaaaaaaaaaagaaggaaagaaaaagctggaagcatcaaactgcctgatatcaaaatattctacaaagctaccatagccaaatcagcatggtactgacataaaaacaaacacatagatctatggaagagaacagagaacctaaatataaatctacacatttatagacagttcattttcaacaaaggcaccaaaagcatacaatgggaaaatagcagtcttcaataagtgctgctgggaaaactgaataacgatatgcagaatgaactagatgccatctctcagcataaacaaaatcaaaacagattaaagacatctaacacctgaaactataaagctactagaggaagaaactggggaaacaatccaggacattggtctgggtaaagatttcttgggtaagacctcaacagcacaggcaacaggagcaaaaataaacatatgagattacatcaaactaaaaacttctccacagcaaaacaatcaacaaactgaagagacaatctagagtatgggaaaaaaatatttacaaactatccacctgacaaagattagtaatcaaaatatataaggaactcaacttgatagcaaaaaaaaaaaaaaaaaaaatccgatcaaaaaattggccaaaggtcagaatacttgtttctcaaaaaacgacatacaaatggccaacaggtatacggaaaaaatgctcaacatggctaaacatcaaagaaatacaaatcacacattaccacaatgagatgtcatctcacctcatagggtggcttttatagacagggaataacaaatactgatgaggatgtggtgaaaagataatccttgtatgcagttgatgggaatgtaaattagtacagccactatagagaacaatactcaggtgtagtggctcatgcctgtaatcccaaaacttgaggctgtggtgggaggatcacttgagcccagaagttcgagccagcctggacaacacaggaagacctgtctgcacacatatgcacacataaaacctgtcagtcacagtggctcatgcctgtaatcccagctctttaggagcccaaggcaggtgaatcacttgaggtcaggagttcgagaccagcctggccaacatggcgaaactccatctctactgaaaatacaaaaattagctgggaattgtggcgtgcgcctgtagtcccaggcaggagaatcacttgaacccaggaggtggaggttacagtgagccgagatcatgccactgcattccagcctgggcaacagtgagactccgtctctagaaaaaaaagagaggttgattcatgggtaaaatacacagttagaagaaataagaactagtgttcaatagatcagtagggtgactacatttaacactcatctattgtacatttcaaaacagctaagagaataacttgattttcctgcaataaagaaaggataaatatttaaggtgacagatattctacttaccctgatttgataatataaatgcatcaaattatcacatgtactcagaaaacatgtacgtctattatgaatcaaaaaactttttttgaattttcaaatagagggtgggagattctggggccaccatgtctgtgggtaaagatattcccttgtcagccaggcgcgggtggctcacacctgttatcccagcactttgggaggctgagacgggcggatcacgacgtcaggagattgagaccatcctggctaacacggtgaaacctcgtcaatactaaaaatacaaaaaattagccgggcgtgttggcgggcacctgtagtcccagctactcaggaggctgaggcaggagaatggcgtgaactcgggaggcagagtttgcagtaagcccagtttgtgccactgcactccagcctgggtgacagagaaaaactagtctcaaaaagaaaaaaagaaaaaaaaaaagatagatattcccttgtctggatcatgtaaagacattccctacaaaaagacattccctgcaagatgtccctccaagttacttcacctaataccacctaccactaaaaacgagcaatgagccatgattatgccattgccctccagcctgggtgatccagcaagactcaaaaaagaaaaaaaaaaaaactcagtatgggggtttctcaaaaaactaaaaatagaactgtcaatagagctaccacccgtaaacctcttgaattttggaggcaacatatacatttgtatgtgctttaacgccccacacagttgcctgtaaggattctagtttcaactgtagacaagagcaatttcaggctgcactgcaggcttcccaagcacttggtccacctgatccagcagacccaatgatactcaacgtgtccatgttaaatggcatcctatttattggaagcctctggcatacaccaacagaagatgtagagtagaggcctctggtattccatagtcaatccatgccctcttgtgcagattaactgtttctcttttgagaaacaggttgtggtttgccactaccatgcgatagagaatgaacaactaatcatgggacatgaagtaactaaggcagatctgagtaatttgagactttctggtccccaaagcacgaagtacatactgtcagcccttatcaaacaaaggttgtcagcttctcctttaggccaaaaaccccgagtttgtaggaaatcgcatgaaataaaggaatatttacacacaccatgagaatccaatcagaaatatctgattgtatgactttctaagagaatgagtgttaggaataacgctcaaaatcctaaggaaattgaacactcgaacaaaggattcttagcaaagcaattttacttctgtgcagaggggtgcctccttgaccagttgccatgagagcacacctgaacaaaggggcatgagagcctttactcctgatgcaagtcctgcccctgtaccctttccctattggccggggtcaggtcgtacaatctaaactaatcccggttggtgaaacacctgattttttttagatagggtgggcacgtagaagaaaagtggagaggaaggggaagggatgtctgtagtgagctagaaagtcctctttctaagtaaggaaaggtatgtgagctggtactgataacgctttgtactgtggcatgcctgggcatctaacaaaggcaaaaaggagaaaaaaggagaaaaagggggggtactatgaattagagaataaaagattgatgagattatttgaagagaaacctcatcatatcctcatatcccacagtgtgactctccaaaagtcaatataatatacaataataactgttctaggtaaaaagacactgaaaacattaacaattgcaatgtaaaaatcttgaatggatcttaaacccaaaaacatccaagagcatacgttgaatcaatgcggagaattttagttattataaaaagcagacattagatgacattattattttttatttaagtgaaatactagtattgtggtttcagaatgacagtgctatttttttaggcgatgcattaccaagtatttaaaggtcaagtatcacgtgtgcaattatgctcaatttacactcaaattgttcaccataaaatgtatttacctgaggtgaaagaaaacaagcacaatgctcaaaaagtaagtgttcaggcacagtggctcacacctgtaatcccagcattttgggaggccgaagcaggtgaactgcctgagctcaggatttcgagaccagcctggccaacatggtgaaaccttgtctctactaaaatacaaaaaaaaattagctgggcatggcggcatgtgcctgtgtcccagctactaggtgtcaggcctctgagccgaagccaagccatcagactccctgtgacctgcacgtatacatccagatggcctgaagcaactgaagaacaacaagaagaagcgaaaatagctagttcctgccttaactgatgacattccaccattgtgatttgttcctgccccaacctaactgatcaattgaccttgtgacattccttctcctggacaatgaatctcaggagctccccactgagcaccttgtgatccccgcccctgcccgcaagagaacaacctcctttaactgtaattttccactatctacccaaatcctataaaactgcccgacccctatctccctttgctgactccttttctgaactcagtctgcctgcacccaggtgattaaaagctttattgctcatacaaagcctgtttggtggtctcttcacatggacgcacctaatgctagggaggcaggagaattacttgaacctgggaggcagaggttgcagtgagccgagatcgcacctctgcaccccgacccgggtagcagagcgagactctgtctcaaaaaaaaaaaaaaaaaaactactagactgggtgtgttagatgttcaagttttccctaggatcaaatttttcagaaaaaaatgtcaaaactacacttagtctaaacatgctgttaataaattcaatagatactactttattacactaatactagaataatattctgattataaagcctccatcctggccaggagcggaggctcacgcctgtaatcccagctctttgggaggccgtcaggcggattacaaggtcaggagttcgagaccagcctggcgagcatggtgaaaccctgtctccactaaaaatacaaaaaaaaaaaattagctgggcatggtccccatgcctgttgtccctgctactcggaggctgaggcaggagaatcacttgaacccaggaggtggaggttgcagtgagctgagatcgcgccactgcactccagcctgggcgacagagcaagactccgtctgaaaaaaacaaacaaaagcctccatcctttcttcctgtgggcccgttttgaagctctgtgggggggtacagacctaggaacttcagataaagacaacagctgtgtattattgcctttctttcttttttgagacggagtttcgctctcatcgcccaggctggagtgcagtggcagatctcggctcactgcaacctcggcctctcaggttcaagcaatcctcctgcctcagcctcccaagtagctaggattacaggggactgccaccaagcctggcttttttttttttttttttttttttgtgtgtgtgagacggagtctccctcttttgcccaggctggagtgcagtggcgcgatctcggctcactgcaagctccgcctcccgggttcacgccattctcctgcctcagcctcccgagtagctgggactacaggcgcccgccatcgcgcctggctaattttttgtatttttagtagagacagggtttcaccatgttggccaggctggtctcgaactcctgacctcaggtgatctgcccgcctcgacctcccaaatggctgggactacaggcgtgagccagcgcgcccagcctgcctttcttttgtagaaaggcttgtagctggtaacaacaaaaaacattaagtccaagaaaataaaataagaaactaaaggctcacagtctacacgtgttcatatttacatgcagatataggcacaccctaaacgactattttttttccatcagaaagtaatgtgtcaaaaataagaataggacatcaatgccagattctcagacgagacatttttaagcaaagaaatggaagtcagagccctcttgaaaccaattttctgcaggtgttcaccaggaacatgccggaaacgccaggttcctgaggcgcggaaatgcggggccggagccaacctgactggaacggcagaaatccttttactttcagaaagaaagaaactcacaaaggttgctttccaagcttttgaagaagggagcacagcggatgaaaccactccagaaaacgcgcggagtcgggacaaacacacttcccgacctggctcctgactgggacccactgagcctgcggcctctagccactggccgcgcaaggaggaccgacagcccctggagaagagagtgaaacgaggcggatcggagaggctcctgggcgacagcacccaatcgttcctttgccgccccccgctatctccgggatccccaagcaggcggaactcaccacagccagggtggactccaccacgataaaggcgaaatggcactgaccatgcggagccagcgccggaaaagatggcgattgtgcgctgacgtcacttccgctccgagcctcgggccgggcggggctcctgggttcgagtttcagccacataggacccagtcaaacacagaaattgtagtttcttcccgggtgggcgcggacaggcccttacttgggggcggtttagaggtgggacccggctagccggcggttcaggtggccggacctgctggaagggcgggcgtgggggatgggacgcaccccaggggatgctcctgcagagcttttcccaggtgggcacagtggctaaggcctgtaagtccaacactttgggaggctaaggcaggtggatagcttgagtccaagagttcaagaccagcgtgggcaaaatagcaacatcctttattaaaatatatatgtgtgtatacatatatataaagcttgtttgtatacatctcatgttcctagagcctttccatgattcttccatatggataaagctgccagtgaatggcatggtctatctcttctattcagtcaggctttctgtaggcctttatttcttcattctttattttttagaacctgctggttccattgcgttttcttttttcgtttttctttttcattttttatttttttttgagacagatctcactctgttgcccaggctggagtgcagtggcatgacctcggctcactgtaacctctgccccccgggttcaagtgattctcctgcctcaacctcccgagtagctgggattacagatgtctgcctccacgcccagctaatttttgtacttttagtagagaagagtttcaccatgatggccagactgatctcgaactcctgacctccaatgatctgtctccctcagcttcccaaagtgctggaattatagacatgagccaccgcacccggccacgttttcaatataataatattttctgtaaatcttgatttttttttgtcttcatcaagtatgtatttctggctgggtatggtggcttatgcctataatcccagcaatttgggaggccaagggatcgtttgaggccaggagtttgagaccagcctgggcaatacagcaagaccccgtctctgtttaaaaaaaattttaaatatgtttttgtttttgttttgagatggagtctagctctgttgcccaggctggagtgcagtggcacgatcttgctcactgcaacctctgcctcccgggttcaagcgattcttctctctcagcctcctgagtagcagagattacaggcaggcgccgccatgcccggctaatttttgtatttttagtaaagacagggtttcaccatattggcccagttggtctcgaactcctgacctcatgatccgcctgcctcacctttccaaagtgctgggattacagatgtgagccaccacgcctggccaaaaacatgtatttctattgttatttttctgatcttcccacatgggccaggaccacatttcctacattgtaaaatagcactgacaccagacattctccccaggtttattcagaaatgtaacataatcccagtaaaaatattaaaagttttttctggagttaggtacgttgatactaaagtttatgtggaagaataaatatctgataataaccaagaaaacaaaaacaaaagcaatgatgagcagcagatgttaaaacatactattaacagttttcacacaaggcaaataattaaattatattaaaataaaaataaataagacatactataaagcctctataattaaaactatgtggtactagcacatgaagcagaaacagactaataaaatatctaaaaacagacccaagaacatgtaggaatttggttcataaatgtggtattttgccaggcgcggtggctcatacctgtaatcctagcaatttgggaggctgaggcgggaggatcacctgaagtcaggagttcgaaaccagcctgtccaacatggtgaaaccctgtctctaataaaaatacaaaaataaaattagccaagcatggtggtgggctttctgtaatcccagctattcgggaggctgaggcaggagaatcgctgaaacccagaaggcagaggttgcagtgagccgagatcgcgccactggactccagcctgggcaacaagagtgaaaatccatctcaaaaaaaaaaaaaaaaggtatttcagatcaatgaggcaaaaaaagccatttgtaatggaaagtctaagacagctgggtagccatcagagaaaagatgaaattaaatccatacttcacagcatatacaagaataaactctaaatggactagggatctaaatgtgaaaaataaaaccatatacgcattcagggtgtaagtgatttcttggctgagtaaggaaaaagacgtgaccacaaggcggcagtagcacacaagcttcatttgggatgtgctttgacaggtaaggagtggcgggaggtagcaaacagcaagagaatatccacaggcttctacctgtgggtcgctgctcagaaagggtggaaaggaagaaagactcccagaggagaaggggaatcaaagagggggcttatatgactaagtgacgatgctcagcagcctggcagcatatcttccagttaaaaagttctgaaggacaagtctggccaacatggtgaaactccgcctctactaaaaatacaaaaattagccgggcatggtggcgggcgcctgtaatcccagctactcgggaggatgaggcaggagaattgcttatacccgggaagcggcggttgtattgagccaagatcgcgccattgcactccagcctgggcgatagagtgagactcagtctcaaaaaaataaaaataaaatatgtaattatctgttcattctgagtacagggaaacactgataggactatcctgaaaataataagattcagaatctatcggggatagatgggaagggcttgaacagaatggtgggataagaacaaaatggagaggatagggatagggaaacctctctgagcatatcattctgtttagttctgatgtttaaaatcacattctactttttttttttctttttgacagggtttcactctgtcacacaggctggagtgtagtagcgttatcattgctcagtgcagcctttactttgtgagctcaagtaatcctcctgcccaagtaccagggaatacatatgtacaccaccacatccagctaatttttaaaaatattttgggtagagaagagatctctctatgttgcccaggctgctcttgaacttccagtctgtcacatataaagttttggtgccacaaaagaaataacacttgaatataaaattttctttttaattctcagcaaggcaagatacttctatagaagggtgcactctcacagatggagcaatggtgggcacacacctggacaagggagggaaaggggttcttattcctgacacacgtggtccctactgctctgtcgttcccctactggctagggttggacctcacaggctaaactaattccgattgactaatttaaagagagtgatggagtgagcggtttgggaaaagggtgctttatgaggaagttaagtttaaaagtagaaggcaaagaattgagcatactgacatattaattctttgaagagaaatttataattcattttcaacaacttcctcctcttgcattttttttatggctttctcttcaaacttatttaacatgtcttgacttagttgttctgcttgattttccaaaagaaggagcttctctggataaggtggaggatagttaaaggaggttttagtaagtgccatttctatgagcctctgcaccaacctacagatgcatggtatgacacggcacctgacaaggataagtacacccattacggctacaagggaggtgagaattgaggctattattcctttccatttaccgaaccacttttctagccattctgtaaatgggtaatttacccctgaattgctggccaactcattggatagaggagtcaggccttgcaatgcctttcttatacttccattaggggccgtgttgtttgggatgaagttgcaacaatgagttttaataatgatgcaaactcctcctctttctgctaataccatgtctaaagctatcctattttcccaagccatcaggttagtagcccccaattgctcagctattcctttaacagcatctctagtgtagttaataaatcgctgttggttgtaatagatgtagtttacccaatctacatttttttttttttgagatggagtctcactctgtcacccaggctggaatgcagtggtgcgatcttggctcactgcaagctccgcctcctgggttcatgccattctcctacctcagcctcctgagtagttgggactacaggcacctgccaccatgcccggtgaattttttgtatttttagtagagacagggtttcaccgcgttacccaggatggtctcaatctcctgaccttgtgatccgcccgcctcggcctcccaaagtgctgggattacaggcatgagccatcgcgcccggcccacccaatctacatttttattaactgtcgcctaccaaaatattgacttaaatcctgcagctattggattttgggctttaaattgatctggtattccccgtgggactccaattgcatctaaatagccgtgagagttgaaagacctataacgggcttgtcttgctttacgaagtcttatctttcctccctctggttgctgaaatgccagggtgaaagggatagccaattggactaaagcacaagtgccactccagttattcagcagagtgtccagtaaaggtccaccacaataccaccacacatccgctcagggatgagcaagggctgactgattggtaagctcttgaaagttcttaagctcactgcatcccttcaggtctccaaggaacactaagtttcctctctgttgtgagagacacgaagtgaacttaatgttgggagatggaagctggatggccctcgggggctgaccagcatgttgttgaacttcaggatatagcagagacagagagtcggcatgactctttaccctaggctgtagaatcctggaaaagagttaccatgcagcccatgcccggtctattggagaaccaccctagtggaaaggggacaatctgggcctctggcctgctgtgcgcactagcataacaattgcttttgtttaacatgcggatggaatatttgatccattccaaccaggtatttacatcttggtatcctgtctcaattgccaaagtttaagtctttaacttctaccatcgctatcatggccttgtccttagatggaggaggaacaatggttccgttgtgagaggttttggaaaaaggctaagaggcaggtgcaggcagcgggagatcaaagaaacgcatttcaaagaatccagtagggtctgtccttgaaacctcagcccctataccataaaaccggcttaaagaaaggaactggcttagaaaaggagaactttggggctcaaaatactaacctgtatagggttgcactggtttggctgacagttggggggggctgtccctttagtaaatgaatgtatggttttaggaaattccaaaaactggttagggcagtccatccttgctctttggtggtccacagaacgttggaccaactacggcataaaagctctacatcgggggttggggtcaagactcctggtttccactgggatctttatggaaatctcccagattaaatggtcctaattcactaatgcccagtctgaggagagccaggagggacagaggtgcttttctgaagtagtgagctgcctttgacttgacaaatccccacagggtataacaaggcaagcattaaatgcaacagtttgaggcaaaattgacttggttatgttaataactagatggtcagcaacagagcgaggaaagaagaaagagtaatagaatagatgaaagacagttaaattcttcttagctttagtttggtagggttttcccctgggactatggcccaccactctggaggtggtggcgcgttcttgactctggtgtgatgagtccatcctctctctgccgtgcggactgcggtttcagtagtgaggagcagtaagtaatgagattcccaggctggctcaggcttctcctctttccagctcttgatgaggacatgatccccaggctgatgatgcactgggaactctaagggtggcacctgtgctaatagacctttagttttaagagaagagagaatagaagatagacaaagtatataatttttaaggattgatcttttgtttcaaaggtaggaatatcagcagtggagtgcaaataaggtaatccatagagcatctcataaggagaaagaccaacgtctttccgtggtgcagtttgaattctcagcagggcgataggaagacacttggtccatggcaatcgagtctctaagactaatttggttaagtggttctttagagtctgattcattctttctactctccctgatgagggtgggtgccagggagtatggtgttcctatttaatgtctaatgtttgggatagctttttaataatgtgtgtggtgaaatgagttccattgtctgagtcaatattttctattagtccaaacctgggtactatattttcaattaaggccttaactacattattggctgttgcatttgaaaaggggacagcttcaaccaagtgagtgaggtagtctactatcactagtaaatattttagacgacctattggaggcatttctgtgtaatcaacttggatactttggaatggccttaagcccagattccttcccccgagaggtaatctttttatagtatgtctattagttttcttacatactaagcaactatctgtaacctgtttggccagagtataaattcctatataactataaactctgagaactgcatcacacatggcctggggcccccagtgggtctcatgatgtagttaggataagacttccctcataaggggtttggacaacatttctctctggtctgacagcatccactttccttctgaattctctttagcgtctatgtttattagtttctcttttttggtggaagagaaaatggggattatggtaggaggagggaggtagggagttaagtgaaaaatatgcatttcagaagacacagcagcctgcttggctacctgatctgctaggttatttcctcgactttcaaaagaggtttttctgttgtccgggaacatggacaatagttattttttccggcaactgaagattattcaatacttgggtgatcagctccttgtgaacaaggtcttgacctttactattaatgagaactcgttcagtccaaatttttccaaatgtatgagccacttcaaaggtgtacttagaatcggtatagatagttccctcctggtcctgtaagtactttaaggcttggctgagtgcaaacagctcacacatttgagcagaccaactgttgggcaatttttctgactctatttctatgagagtttctccatcaatcactgaatacccattgtgtctttttccctcaatcacccaggaggaaccatctatgaataagtgccctccagtccagaagggggtttctcctaggtctggtcgaacctttctatggtaatcaattaaatctaaacatgtgtgttctctccttagatttggattccctgtaggaaacctgctgggttgagtgaattatcagtggtcagtgttaaaccatccttttttttttttctttttttgagacggagtctcactctgtcaccaggctggagtgcagtggtgccatctcaactcactgcaacatccaactcccaggttcaagcgatcctcctgcttcagcctgccaagtagctgggactacaggcgtgtgccaccacgcccagctaatttttgtatttttagtagagatggggtttcaccatgttggccaggatggtcttgatctattgaccttgtgatccaccagcctcggcctcccaaagtgctgggattacaggcataagccaccatacccggccataaatcatctttttctaacagaatggcctcatactttaagattcttgagtcagtaagccatctccctgctctatggtttaagatagttctaacttggtgaggcgtgcttactgtcaattttcctccaaaggttaactttctgctttccttgactactattgctgtagctgcgatggactggatgcattgaggccatccacaagtgactgggtctgaggcttttggtaggaaggctacaggctgtcggcagcctccatgctcttgagtcagcactcctaaagttatcccactgtccacattaacaaaaaggtggaatggcttttccagggagggttaggctaaaacaggggcagttatgagcctttccttcagcttctcaacttgatcaacttcctcagaagtccacaggagacagttaggtttctcctgagcaagtttttgatataacagtttactgtgcagtgcatatgagtcaatccaaaagcggcagtatctaactaatcctaaacatttcctgagttcttgtttagtttgaggcaagggtagggacacaattccctcaattcgttcaggccctattcttcacttgtctgcacttattaagtggcctaaatacttaacttcgggatctacatactgaagctttcttgttgagactcgtagcccctcaaactacaggtgattaagaatatgtgtagagaagtcagttaccttctctatatcttcaccagatataagaatgttgtccacgtactgaagaaggtatatttgttctgggatgacaactttttctagtacttgttctaaactttggccaaaaagattaggggagtctgtgaacccttggggcaagactgtccatcgatattgttgtttccaccctgattggggatctcagctatcttcagccaggggacatgcccaaaaagcattcttcaaatctattacagtaaaccattgatgattacatgaaatcttgttaagaatagtgtaaggattggggacaacggggtgggtagtctggactatttggttgatagctctacagtcctgtactagccgatatgacccatctgatttcttgactggcagtattggggtgttttaaggagacatacagggctggagaagcccgtccttaataaggcctttgattataggtttcaaccttatcctgccttctaggggaatagggtattgtttccttcttactacttctcctggggtttttagctgatgtggattggagggacttggagtttcccttagtctccttctttggaccagacattaggattaatatatttttcatccgcagtggtgagtaggtttaatggggtgaagaattctcttgggctgacttgtagacctatgcccaactttaacattaaatccctccccaggaaattagttcctgcttcagggattaacaagaactgaatataagctgagcgatcctggtgtctaacttctgtgctttgtaaaatttttgctctaaatccttccccttttaccctggaaactaaaagttcctctgaggaggagccaacattagatggggggaaacaaacaggagcgagcagcccctgaatcgactaaaaaggcgataagctcatgtttaggtcccacatccaaattgatcaagggctcctggtgggactcaagataaaagagacagggcccctgacccccctattccttgaaagtcatgagtggaagggcttctttctccttagttcaggacattctctcttgaagtggcctgttcttccacatctatagcacatatcttgtccttcctccctcttagttctgggattctttaaccctgtccccccatactctttagggggcctggtagatgaggacctttgtcctccagatggaggctgggggcctttaaaacagggttcagaccctttatactttctaggtccctggaagctctgtctagaagtacctgggtttggagccatctgttggaaggtggaaaacataagttttgttttttgtttctgtttttcttcatcccgtttcacatgtactttctaagcttccctgagaagctcacttagaggacggtcttcccaattgtctattttttataacttttttgaaatgtctaggcaacttttactgacaaattggagtttcaacattccttgcccaaggagatcatccaaagtaaggcctgcatattgcctcatttgctccctcagtctgtctaggaatctcacagtcccttcatccttttcctgttgtatatcaagcgctttagaaagattgcgggttcagggtactgattcctgatttccttttattatcatctcccttaggtcctgcatattttcccggtgatctgcgttgttattgtcccaccgggggtcttgggtggggaatttctgttccgcggtaggaacgtttttaccgggagggtgctcacgttccctaagtaccatagcagccctaggaatcatactccttttttcccctgaaaagaggacggccaagatggacattaactcgacccaagtgtaactgaggtcctaagaattggtcaatttggtctgccactctgtaaaggtcatctagtagtggtttaagctcctttttaaaattccggacttctgaactggttaagggagcatttacaaagccaattacaaagccattggcccccactccttgtggtacctctttcaaagggaataaggtcagggctgacctcttaggtatggagggaagcggaaaattctgagtatcttttttacattgttctacctcacgctggagtccttttagagaggggtatttaggttggggggaggacaggctggtgggatggtaattcccaagagtcagggttataaggaggagggataacacgagtagagggggagtttagaatgggatctgaggtggaagtggctgtctgaggggaaagattggggatactgaatggaggaagatagtttaggggatcccatgcactggagtctttaggcatgagatctggctcctctgacttttcattttgaggtgccagattgggttcttccctatttgtttttaagggaaaaaggagggctggtccttgcctccaacaaagggcatagcgtagttcttcttgagacactggacttttattattaacatatcagattggaagctgacacattacatcctcagttgattcaaactttggccagaagattgaggaattaaggatgggtccctgagtccaaataaaacagcaatattttattatttgttgctttttcctatgtttagtcctttcattatccttccagtgtttcagcatgagacctagggggctatctgggggaatatctttgttaccatctttatcccccttgctccctgtcttgcttggggtatttcccatcttgatggttttggggtaaggttcaaggttcagtttcccttactggaaatttctcacctttcagggtgaggcttaattttcactggaaactttttgccttttggggtaaggctcaatttcccctctggaaatttcttgccttttctactattggaggtttgtgtgaggttcaatcccccccaacaatggggatgtctcacctctttttaaccacttagccaccctgaccaaggagtacttcactgcacccacccccaacccccgtggctttcttaccttgttcctgaccaccaaggaaatactttactggctcctgtggcatctccttccttggtaggtgcacagagtcatcactgcagtatgtgaggatcctttaagctaggttgctggccagttgtttttttcctgcattgcttagagctagggttattcctcacaatgggtgggttctgatttctcccctatgaggccaccacaaagggtggggtgcatgcctcctcaagagagagaaccagagaccacccccagaggggaatgtaatcctggatgagcccccaaattgttatataataagtttcagtgctgcaaaagaaatagcactcgaggccagatgcagtggctcatgtctgtaattccagcactttgggaggcctaggtgggtggatcacaagggcaggagatcgagaccatcctggctaacacagtgaaaccccatctctactaaaaaatacaaaaaatgagccgggcgtggtggcgggcacctgtagtctcagctactcaggaggctgaggcaggagaatggtgtgaacctgggaggtggagcttgcagtgagcagagatcacaccactgaaccccagcctggacaacagagtgagactccatctcaaaaaaaaaaaaaaaaagaaaaagaaatcgcattcaaatataaaattttatttttaattctcagcaaggcaaggtacttctatagaagggtgtgctctcacagatggagcaatggtgggcacacaccttcacaaaggagggaaaggcgttcttattactgatgcacctggtccctactgctgtgtcattcccctattgggtagagttagaccacacaggctaaactaattccaactgattaatttaaagagatggacggggtgagtggtttggcaggaaaaatggttatgaaatgaattggaatgaatgagtcagggtggagaaggtaatctgaatgagcagaatgagtcagggtggagtaggtaatgagtcaaggagtagaatgtgtcagggtggaaaaggttgctttacgaggaagtttaaaagtagaaggcaaagaattgagcatactgacatattaattctttgaagggaaacttcgaattcacactcaacaactctaaagtgattctctatccttggcctcccacatttcttttttttttttttgagacagactctcactctgttgccaggctggagtgcagtggactgatctcagctcactgcaacctctgcctcctgggttcaagtgattctcatgcctcagccccccaagtagctgggactacaggtgccagccaccacgcccagtgaattttcgtatttttagtagagacggggtttcaccatgttggccaggatgctcttgatctcctgaccttgtgatccacctgccaaggccacccaaagtgctcagattacaggcatgagccaccatgctcagccttggcctcctacattgttgggattacagacatgagccactgtgcttggccctttattcctttacatatttaatattttaaaaaattaacaaagaggccaggcacagtggctcaggcctttaatcccagcactttgggaggctgaggtgggtggattacgaggtcaggagttcgacaccagcctggccaatatggtgaaaccccatctctactaaaaaatacaaaaattagctgggcatgctggtgcgtgcctgtagtcccagatactcaggaggctgagacaggagaattgcttgaacccaagaggcagaggttgcagtgagccaagatcgctacactgcactccagcctgggtgcagagactccatctcaaaaaaataagtaaataaataaacaccacacccaatcagctcaagcctgtggctagagataagaatgcagaaagaattggccaggcgcggtggctcacgcctgtaatcccagcactttgggaggccgaggcgggtggatcacgaggtcaggagattgagaccatcctggctaacacagtgaatcgccgtctctactaaaaacacacacaaaaaaattagccgggcgtggttgtgggcacctgtactcccagctacccaggaggccaaggcagaatggagtgaacccgggaggcagagctcgcagtgagccgagatcacaccactgcactctagcctgggtgacagagcaaaactgtgtctcaaaaaaaaaaaaatctagaaagaatctagagacatctttcctgcccaagatagtgttttcctcctacttcctttaaactgactatccatgtatttgctcctaaatttaaagtgactcacaccctattcccttatgtatacagctagctgccacaacctccctccttctctgcctctcatccctgccttgcgtgacccatggatggaagactgtcctcaaaactcattttgccctcccttcccaggacgtgtaagcaataaatctttgaaattatgtcctattggggtggtgttttgaatttgcacataccatctgaagaaccaggggccgcccctggttgagatttccccagggagctggtggggacacaaggtcaggtttccagtgtcagagtgatgatcaggcaggcataaactgaacacaggtcagacaagagcagctatgtcgctgggcacggtgactcacgcctgtaatcccagcactttgggaggccaaggtgagcggatcacctgaggtcaagagtttgagaccagcctggccaacatggtgaaacctcgtctctactaaaaataccaaaaatattagctgggtgtggtggcatatgcctgtagtcccagctactcggggaggctgaggcaggagaactgcttgaacccaggaggcggaggttgaagtaagccaagatcgggccactgcgctccagcttgggagacacagggagactccatcttaaaaaaaaaaaaaaaaaaaaaaaaaagagcggcctaggtcatctatcagtataaacaagtttcccaggtgagggaccccctgtcaaccaggttttgcgtgacaactcacactgtaatcccagcactttgggaggctgaagcaggcagatcacttagctaaggagttccagaccagcatagccaacatggcgacaccccgtctctactaaaaatacaaaaattagcccagcatggtagtggaggcatgtaatccaagctacttgggaggctgaagcaggagaatcgcttgagctctggagtggcaggttgcagtgagctgagatcacgctactgcactccatccagcctggatgacaaaggcagactctgtcattcatcaatcaataaataattaattaactttaaaaaatgtatcccttaggccagtcgtggtggctcactcctgaaatcccagcactttgggaggctgaggcgggcagatcgcctgaggtcaggagtttgagaccagcctgaccaacatgatgaaaccccatctctaataaaaatacaatattagccgggtgtcgtggttcatgcctgtagtcccagctactcaggaggctgaggcaggagaatcgcttgaatccaggaggcagaggttgcagtcagccaagatcaagtcattgcactccagcctgggcaacacagcaagactccatctcaagaatgcaatggaatggaatggaatgaatggaatggaatggaatggaatggaatggaatggaatgggccgggcatggtggctcacgcctgtagtcccagcactttggaaggccaaagcgggtggatcacctgaggtcaggagttcgagaccagcctgaccagtatggtgaaaccccatctctactaaaaatacaaaaataaccccagctacttgggaggctgaggctggagaattgcttgaacctgggagacagaggttgcagtgagccgaaattgcgccactgcactccagcctgggcgatagagggagactccatctcaaaaaaaaaaaaaaaaaaaaaaaagaatagaatagaatagaacagaatagaatagaatagaatggaaataatgctgagtgcagtggctcacgcctgtaatcctagcactttgggaggctgaggcaggcggattgcctgaactcaggagttcaagaccagcctcagcaacatggtgaaaccccgtctctactaaaatacaaaaaaaaaaaaaattagccaggcgtggcggatgtgcctatagtcccacctacttgggaggctgaggcagaattgcttaaaccggagaggcggaggttgcagtaagctgatattgcgccactgcactccagcctgggcaacagagcgacactctgtctcaaaaaaaaaaaaaaaaattaaattaaattaaaaaaaaaataggctgctgggcgcggtggctcacgcctgtaatcccagcactttgggaggctaaggcgggtggatcaacaaggtcaggagatcgagacaagcctgaccaacatggtgaaatctcatctgtactaaatatacaaaaattagccggacgttgtggcatgtgcttgtaatcccagctactcagaaggccgaggcaggagaatcgcttgaaccccggagaaggaggttgcagtgagccgagatcgtgccactgcactccaacatgggagacagaacaagactccaactcaaaaaaataaataaaataaaaataaacaaataaataaataaaataaaatgtatcacttgaaagaaaggctccctgtaaacacccacatctggctccccttcatttcttgttagggcagcattgctagtcactctgctattggatccttaatataggtaggggctcaagacagaccaaaacggaaagaaaaaaataaacaagaactgacccaagtaacttctggggttttttaaaatttttttattttttattttattttatttttttgagacagagtcttgctctattggccaggctggagtgcagtggcacaatctcagatcactgcagcctccacctcccaggttcaagtaattcttatgcctcagtcggccgagtagctgggattataggcacatgccaccacacccagctaacttttgtacttttactagtgacagggtttttgccatattggccaggctggtctcgaattcctggccccaagtgatccacccaccttggactcccaaagtgctgggattacaggcatgagccactgtgcccgggcagtaacttctgttttattgtatttctttttactgtgataaaaagcacataaaattgacaagtaacacattttttttttttttttttgatgcagggtcttgctctgttgcccagcctggagtcagtaattcaatcatagctcattatagccttgaactcctgggctcaagcaatccttctgcctcagcatctcaagtagctgggactacaggtgtgcaccaacatgcctggccaggttttaaaaaatttttgtggagacagggtcttgctatgttgcttaggcaacaggctgaaactctgtctctacaaaaagtaccaaaaattacccaggtgtggtcgtgcatgcctgcagtcccaactactggggagtctgaggtgggagtatcacccgagctcacgaggtcaaggttgtagtgagccacaattgtgtcacggcactccagcctgggtgacagggtgagaccctgtcccccagaaaaaaggaagaaaaaaaaaaaccaaagtcttagaagtataactctttttagaattgatatgtaaagctgggctcagtagctcatgcctgtaatcctagcattttgggaggccaaggcaggcagatcacctgaagtaaggagtttgagaccagcctagtcaacatggcaacaccccaactcaactaaaaatacaaaaattagctgggcaaaggccaggtgcagtggttcacacctgtaatactcccagcagtttgggaggccgaggtggggggatcacaaggtcaggagttcaagaccagcctgaccaacatggtgaaaccctgtgtcaactaaaaatacaaatattagctggacttggtggtgcacacctgtaatctgagctactcaggaggctgaggcaggagaatcacttgaatccaggagaaggaggttgcagtgagcccagatcgcatgattgcactccagcatgggcgatagagtgagattctgcctcaaaaaaaaaaaaaagttaaataaataaatacaataaaataaaataaattagctgggcgaggtggcacatgcctgtaatcccagctactcaggaggctgaggcaggagaatcatttgaactggggaggtgaagggtccagtgagccaagatcatgccactgcactccagcctggatgacagagtgagatcaactaaaaaaaaattgatatgtaatagttgtacactattgccttgaatgcctggcctcaagtaatacccctggctcagtgtacttagtagttgcaatggaaggaatacagcacctaaactcaagagtttttttgttttttttttttggtagagatggtatctcactccattgcccaggctattctcaaactcttgagctagaatgatcctctcttctcagcctcccaaagtgctcagattacaagcatgagccaccattcccagcccagacatttttacattacatgaaattttcaaggtccagttggtcctaattctccataaatcctttcagagtattaaaaatgaagcaaattttgctaaagctttttatgatgccagtacaagatatatgtatatcttgtttctatcactgataaaaatagtacaatcattaaaaactgcagaatcatatcagtaatgaatattgctacaaatgtactaagtaggccgggcacagtggctcacgcctgtaatcccagcactttgggaggccaaggcgggctgatcatgaggtcaagagattgagactatcctggccaacgtggtgaaaccccatctctactaaaaatacaaaaattagctgggtgtagtgtcgcgtgactgtagtcccagctactcgggaggctgaggcaggagaattgtttgaacccaggatgcagaagttgcagtgagccgagatcgcgccactgtactccagcctggcgacagagcaagactccatctaaaaacaaacaaacaaacaaaacaaacaagcaaaaaaacaccaaaaaacaaacaaaaaaaatgcactaagtataatagaggcaggattgcttgagcccaggagtttgagagcagcctgggcaacatagcaagcgactatctctacaaaaaatttaaaaattagctgggtgtggtagagcacccctgtactcccagctacttgggaggctgaggtgggaagattgcttgagcccaggaggtcagggctacagtgagctgtgtctgcaacactgcacctagcctaggtgataaagcaagatgagaggggaagggaggggggggaggggaggggggaagaaaagaaaggaaggaacgaagggagggagggagggagggagggagagagggggagagagagagagaaagaaagaaagaaagagagagagagagaaagaaagaaagaaagaaagaaagaaagaaagaaagaaagaaagaaagagaaggaagaaaggaaggggaaagaaagaaggaaagaaagaaaagaaaagaaagcaagaaagaaagaaaaggagagggagggagggaaggaagggtgaaaaagaaagaaagaaggaaggaaggaaggagaaagaaaggaaaggaagaaagaaagaaagaaaggaaggaaggaaggggaagggaagggaaaggaaaggaaagaaggaaaggaaggaaaggaggaaagaaagaaggaaggaaggaaggaaagaaagaaaaagaaagaaagaaagaaagaaagaaagaaagaaagaaagaaagaaaggaaggaaggaaggaaggaagaaaaagaaagaaagaaagagccgggtgcggtggctcacgcctgtaatcccagcacttcagaggccgaggtgggcagatcacctgaggtcggaagttcgagaccaggctgaccaacatggagaaaccccgtctctactaaaaatacaaaattagctgggcgtagtgacacatgcctgtaatcccagctactaaggaggctgaagcaggagaatcgcttgaacctgggaggccgaggttgtggtgagccgagatcacgccattgcactgcagcctgggcaacaagagtgaaactccgtctcaaaaaaacaaaaaaacaaaaaacaaaaaacaaaaaaagatgaaagaaagagagagagagggagggaaagaaagaaattagcaaacaaattccaacgccatggtaagaaagtagtaaacccagtggcatttactccaggaatgtaaggttggttctggctgatttgtatctttgtattagtgcattcaccattatggatgatgtgtggagtttgcccacagcaatactcaagaccctttcagacacatcctcccccaaaggggaacattcacctgttctcaggggtaaaactgcagcctcagtggaggacagatgaaaccctctgctctgacggactagagaatgcagtgggggatagacggcagcctcgccagacagcagtcaattctctggccctctgcaactctggatagggctgagtccctactttcaggtggggagagtcactctgggggcttcaagaacactcttctgtcagtccatccaaccaggttcaggagccaatggaagaaatctgagaaaggaaggggttctgttgaagatggcttttgagaatcactgaaataaatgcctggtaggtcttgaaattctaacttctgacgtattagtccattttcatattgctatgaagaaataacagagactgggtactttttttttttttttttttttttgagatggagtctcgctctgtcacccaggctggagtgcagtggcacgatatcggctcactgcaacatccgccttccacgtttaagtgattctccagcctcagcctcctgagtagctgggattacaggtgcacgccaacaggcctagctaatttttgtattttttagtagagacagagtttcactatgttggccaggatggtctcaacctcttgacctcgtgatctgcccacctcggcctcccaaagtggaattacaggcatgagccactgtgccaggcctttgttttgttttgttttgttttgttttgttttgttttgtttgagatggagtattcctctgttgcccaggctgaagtgcaggggcacgaccttggcttactgcaacgtccacctcctgggttcaagtgattttcctgtctcagcctctggagtagctgggatcacaggcgccagctaccacgcccagctaattttttgtatttttagtagagatggagtttcaccatgttggccaggatggtctcaaactcctgacctcaggggatccacccgcctatcctccaaaagtgctgggattacaggcgtgagccaccacatccggcttgataactcttatttttttgtagagatggaatctcactatgttgcccaggctgatcttgaactcctggcctcaagcaatcctcctgacccagcctcccaaagtgctgggaatatgtgtgtgagccaccatgatcagccagaatagacaacttttattattttttaaaatattttgtactattttttttcgagatggaatcttgctctgtcacccagagctggagtgcaatggcacgatctcaactcactgcaacctccgcctcctgggttcaggcaattcttcctcctcagcctcccaagtagctgtattacaggcttgtgccaccatgcctcgctaatttttgtatttttagtagagatgcggtttcaccatattggccagcctggtctccaactcctcacctcttgatctgcccaccccaacctcccaaagtgctgggattacaggtgtgagccaccatgcccagcacgtagtatttttcagtagagatgtagtctcactatgatgtccaaggtggccttgaactcctgggctcaactgatctttttgcctaagccttccaaagtgctgggattacaggcctgagccactattcccagcctagattcttatagcatatagatggataaagaatttagaaaaagtaggaacattccccaatacagtatatgacagtcataatttacatgtaaatatcattcagggccgggtgcagtggcacacacctgtaatcccagcactttgggaggccaaggcagttggatcacgaggtcaagacatcaaaaccatcctggccaaaatggtgaaactccatctctactaaaaatacaaaaattagctgggcgtggtggtgcatgcctgtagtcccagctccttggaggctgaggcaggagaatcgcttgaaccggggaggtggaggttgcagtgagcctagatcgtgccactgcactccagcctggacacagagccagactctgtctcaaaaaaaaaaaaaaaatcattcagggacaagaagaaaaaaaaattgcagttattcaaacatagctccataacatattagtaaaggtaatcaaatagtcttttaaaatgatccattatgtctcagttgggcttatccaggaatgcaaggttgatgtaacactagaaatgtaataaatacaaaaacacatttattttattttatttctgatggagtctcactctgtcaccaaggctggagtgcagtggcacaatctacacttaatgcaacctccacctcccaggttcaagcgattctcctgcttcagcctcctgcgtagctggaattccaggtgcacacaaccacacccagctaatttctgtatttttagtagagatggggcttcaccatgttggccaggctggtctcgaactcctgacctcaagtgatctgcccatccctgcctcccaaagtgctggtattacaggcatgagccaccacacccaacctgaccacatttattttagagatgagtccttccatgcattcattcattcgttttgttttttgttttttgagatgtggtcttgctatgttgtctaagctggtctagaacccctgggttcaggccatcctcccaagtagctagaactatagacatgcatcaccacatcatttcattgaagtatttattacataccatcattggccaggaacagttctaggtacttgagttctagcagtaaataaacatgatcatcacagaggatgcacaggaagcatttaataaattcaagaggaattcagcctcatgaattatgaaatactgggaaatcattcatcatgtaaaaactggatataaaaagaaacctttcctgtaagagattagcctcttcaaaaaataaaataaaaacctacagccaagccaataaaatagagcacgtatctcagcagaactgcagacaattatgctggtattactgctattcattggtggtgtgctggaggttgaaattagtccagtaaagcaagaaaatatatatataggtataacctaacgactaaagtggaaaagtaagagtcattatttacagattatgtgattgtctatgtggaaacggaaaagaatcatattaagtactttggactgaatgataaccctgaaaattcatatgttgaagctccaaatcccaatgtgactgtatgtgaaaatagggttttttagttttgtttttgagacagagtctcgctctgttgtccaggctggaatgcagtggctgcgatctcggctcactgcaacctgtgcctcccaggttcatgccattctcctgcctcagcctcccgagtagctgggactgcaggtacccgccaccacgccaggctaattttttgtatttgtagtagagacagggtttcaccgtgttaactaggacagtctcgatctcctgacctcgtgatccgcccacctcggcctcccaaagtgctgggattacaggtgtgagccaccgcgcccggcctgaaaataggctctttagaagtatcgtgaaatgatgtcaagagatgggtagggggagggagggggagggaggggaaggagagagatggtggggagagagagagaaagaggagagaggagagaggagaaaggagagaggagagagagacctatttgttggtttccttcctgtgaagacatgaggaagtgggcatttacataccaggaagagagctctcgccagaagttgaccatgctggcactctgatctcagacttccagcctcgagaaatgtgagaatataaatttgtttttaacctcatttatttaaaattaacaaatttgtaagccatttggtctgtggtattttgtgatagtggcctgagctcattaaggcagattaaaaacaaacaaacaaaaaaactaaaaatgtgaagcagatttgaaactgacaaatgaggctggaaaaattctgatgtgcaagctggaagtaaggttggtaagggtgatcctggtgaggtgtcattggggaatgaggaacatgctattgggaaataaagaaaatacaacccttgatacgaagtagtgaagaacttggcagaactgtattctagcactttgcggaaggtagagcttgagagagataaaactggttatgtatcactaagatctgtacttaaagtgttaaaggacacaggaagcttcattcttcctgagtgcttacaggaaaatgtgctcagaacaggccccccaaatttggacataaacaggccatgagaaactgcccataaacaaaatctctgcggcactgtgacatgctcgtgatggctatgacacccatgctggaggttgctggtttacccgaatgagggcaaggaacacctggcccacccacggtggaaaactggaaaactgctcaggcattcctaaaccacaaacaataccatgagtgatttgtgccttaaggacatgttcctgttgcagataacaagccagagcctgtccctttctttcttgtaaggaatacttttagctaatctataatctatagaaataatgtttatcacaggcttactgtcaataaatatgtgggtcaaactctgttcaaggctctcagctctgaaggctgtgagccccgattcccactctgcactctatttctgtgtctttgtcttaattcctctagagctgctgggtcagggtctccatgacccagctggtctcagcaaaaatgcaaaaggagacctgaattgcagaaaaaattgttaaggaaaaaggaaccagaacttggagatttggaaaattctcagcctatccataatgcaaaaattagaaaacttgtactgaagagaatcctcaaagtgtggctgaacgatcatctgataaagagatcatgagtgggattcatggactatatcagccaccttgacagaagtgagaagagagactggattatactagaagagacattgccacttacattgtgccatctaaaatagacatacaaggcagaacaggcaaggctgtcacacttcttagattttacaaggggacacagaaataatcagctgtgaaagggcactggcagttatggatggtttcattcctgacacgctctgcaggatccgtgggatcagaagagacccttggaggagcatctcttaacaacccacctttggggtcctacatcatcttggcttctggtaaattttgacataaatgtgccacactggcagccactaaccaacaggggctggggtcaatctgcatgatttatctcatacacaacttgttaatgctatgatcttaggaatctaatcaccaaggtgaggcagcctgcagtactgacctcaccatccatgacccttcttcacagatgcccagactcaggcaaccatgatgttgtattcagaacctgtaggtttaatttcagaccctcaggatggtatctaaggccaatccatgagtcattacaacctccaaaaggcatttaggacaaatctgataatctttggtgtcattgccaataattaaagatggcaaccgatgggctaaatggtaacactcatatccttgcattcatagggtttctccccagtgtgaattctttcatgtctacttaggcgtgaggaaacagcaaatgctttcccacattctttacatacgaagggtttctctccggtatgagttcgcaggtgaacattaaggcgtgaggaatatagaaatgctttcccacatatcttgcatacaaagggcttttctccactatgagttttcaaatgtttactacgacgggaagaagtaatgaaggtcttcccacattcaacacattcataaggcttctctcctgtgtgaattcttgtatgctgaataagacttgtggatgtagtgaaggctttcccacattccttacactgatagggtttctttccactgtgacttcgtatgtgtatagaaaggcccgagtactgagcaaaggcttggccacattccttacattcatagggttttattccagtgtgagttcttacatgttcagtaagttgagttgatctagtgaaggctttcccacagtaagtacacttgtgtggttttattccagtgtgaatttgaatgtgatcattaaggcatgaggaatttctaaaggatcttccacattctttacattcaaaggacttctctcctttatgagttttcacaggtgcataaagttgagaaaaattagtgaaggatttcccacatttcttagtctttttggatttctttcctgtatgaactgctacacactgctttaggtgtgaagaagctgtgacagctctcccatattcctgaaattcacagagtttctcatcagtgtggattcccatatgattatcaaggcttgcaaaatacttaaagccttttccacattccttacatttgtagggttgtcttgcattgagaacttcaagatgtacagcaagacctggagttagagtaaagacttttccacatggattaaatttggaaagttcctgtccagtagaggcttccttgtgcacactgagggtgtcttttccataacaattaccctcagaagtattccctccattctgaactctcatgtgtgtcttaaggcaaaactgttccctgaagacctctccacaattcttacagtcacagagtttccatccactgtagcctcttgtctgttgatgacgagataaaggttttaaaacattttcagacatattaagagatttcacccatctgaacacagaagcattttgatgacaattatgattttactttttaatatttaatttttttttctttttgagagaaagtcttgttctatctccctgtctggagtgcatggcacactctcagctaacggcaacctccacctcccaggctcaactgattctcctgcctcagcctcccgagtagctaggaatacaggtgtgcaccactgcacctggctaatttttctgttttgtagaaacaaggttttgccaagttacccaggctggtctcaaactcctaagctcaggtgatctgcctgcctcggcctcccaaagtggtgatattacaggcatgacccaccacacccagtatgtttcacttttttcagagttggggttttgctccattgcctggactatagtgcactggtgtgatcatggctctctgtaacctcaaactcctggctgagttcaagtgatcatcctgccttagcttcctgtgtagctagaactatttgaatgcaccctcatgtctggccaatctttcagtttgtttgtttatttatttatttagagacagagtcttgctctgtagcccaggctggagtgcaatggcatgatttcggctcgttgcaaactctgcctcccaggttcaagtgattctcctgcctcagcctcctgagtagctgggattacaggcatgggtcaccatgcctggctaatttttgtagttttagtagagacagggtttcaccatgttggccaggctggttttgaacccctgacctcagatgatctgcctgccttggcctcccaaagtgctgagattacaggggtgagccaccatgccccacctcagtttatttatttttgagatgtagtctcactttggctggagtgcaagtggcgagatcttggctcactgcaacctccacctcctaggctcaagtgattctcatgcatcagcctcgcgaatagctgggattacaggcaggtgtagccacatccagctaattttgttattttttgtagagatggggtttccccatgttcgccaggctggtcttgaactgctgacctcatgatctgcctgcctcaacctcccaaattgctgggattacaggcgtgagccaccacacccagcctcaatttatttttatagagacaaagtcttactatgtagcctaggctgatctcaaactcttcacaaaaccccactgcctcagcctcccaaagtgctgggattacagccatgagctaccatgtcagcctactttgataattataatttttacaatttttcttccttgtttttattccctgacttcttgatttcttccagattgaatgatgggcccttttgccagaattctacgccactggctctaattgttcaaaaaaagaaaactgtagggtttttttattattatgcagggtggtttgagacaaggtctcactctgtcacccaggctgggtaccatggcataatcacagctcactgtggccttaatctcccaggctgaagccatcatcctgcctcagtcccccaaggagcttggattacaggtgcatgccaacacgccctgctaattttttattccttgtagagacagggtctctgttgaccaggctggtcttgaactcctaggctcaagtgattctcctgcctcagcttcccaaagtgctgggattacaggtgtcagccattgcacccagtcaaatagtgtagattttcatgaaactgtgtaaatcctcaatgtctagttacttatgtgggaatgtgtacttgtgggtattttgaggtgacaagttatacagatatggaatatcataaaattcatcacattcagactatctctccagagatcctgctccctcagtggtgcagaattcttctctaattctctcaagtatctctcatttgtgcagtttctttttcactgcaaactccacctcctgggtttaagcaattctgcctcagcctcccatgtatctgggattacaggtgcctgccaccacacctggctaactttgtatttttagtagagataagagtttcattacattggccaggctggtctcgaagtgctaatctcaagtgatccacgtgcctaggcctcccaaagggatgggattacagactcagtttcttttctttatttctgagacagagtctcactcggtcaaccaggctggaatgcagtggtgcaatctcagctcattgcaacctctgcctctgtgttcatgccattctcctgtctcagcctcccaagtaactggtatgacaggtgcccaccaccacactcggctaattttgtattcttagtagagatggagtttcaccatgtcggccagcctggtctcaaactcctgacctcaagtgatccacccatctcggcctcccaaaatgttgggattacaggtgtgagtcaccacattcaccttctttttaaaatcagagatgggatcttactatactgcctaggctggtcttgaactcttgggctcaaatgagacccccacttcagcctcccaaatagctgggattacagatgtaagccacacctctgactgagctgattttctagaatggaattctctatcttttctaagagaggaaattaagaaatatccctcatgaatcttaccatttgtatcccactgaatatttgattcttcaaaaaaccctgctgaagtgatgaccgtttggttctaggttgtatttcccattctaaagttaagcagaaaaagaaacgtaaggatttagagaagaaatattcatttaaaatgagtcatttttacttgttttcaaattaaacacagcaataaaataaaagccagagaaccttgaggattttggtacatcaaaaatttggctataatgatgtggggtttattacataactgatgtgtttagatagtttattacaaactacttctgtaaaaattaaaaatgccgggagtggtggctcacacctgtaatcccagcactttgggaggctgaggcgggtggatcacttgaggtcaggagttcgagaccagcctgaccaacatggagaaaccccatctctactaaaaatacaaaattagccaggcatggtggcgcatgcctataatcccagctacttgtgaggctgaggcagtattgcttgaacctgggaggcagaagttgcagtgagctgagatcatgccattgcactccagcctgggtgacagagcaagacttcagaaaagaaaagaaaattaaagctgatggaaaacagaaagagtagattttcgggaaaggaaagtaggaaagatctagataaacagcatgtatcagaatgataaagttaacaaagaaacagaacaggtagttttattagatcataggaatgtttgacaagatggaaaataagagtcaaagatatccaaaactctgagaaaaatagcttaaatcttctgaggcaaagtgcatctttaaaaatcttttttttttttttttgagatgaagtgtcactctgtcacccacactggagcgcagtggcacaatgttggctcaatgcaacctctgccttctgtgttgaagtgattctcctgcctcagcctcttgactagctgggactaaaggcgtgtgccaccacgtctggctaattttttgtatttttagtagagatggggtttcacagtgtaggacacactggtctcaaactcctggcctcagacaatccacccacctcagcctcccaaagtgctgggattacaggcatgagccaccacacctggccaggagatatatttctaatacaagcaatgtaattattacaaaagggatataaaagctaagatctccatttctgtgcccaaaaaagattggttatctctgacccattaaacccaaattcagacttatgtacacacctgtaaagcactaaaacttttatttcagtaagaaataaagtaggctgggtgtggtggctcatgcctgtaatcctaacactttgggaggtcgaggtgggtggatcatttgaggtcaggagtttaagaccagcctggccaacatagtgaaactccttctctactaaaaatacaaaaattagctaggcacagtgacacttggctgtaatcccagctactcaggaggctgaggcaggagaatcacctgaacctgggagggcagaggttgtagtaaacagagattgcaccaccgcactccagcctgggcgacagagcaagaccctgtcacaaaaataataaataaataaagtaagtaggctgggtgcagtggcttacaccataatcccagcactctgggaggccgaggtgggtggatcacccgaggtcaggagttcaagaccgggctggccaacatggcgaaaccccatctctactaaaaatacaaaaaaaaaaaaaaaaaaatttaactgggcatggtagcaggtgtgcctaataccagcaacttgggaagctgaagttgcagtgagctgaggtggcaccattacactctagcctgggtgatggagtgagactctgtctcaaaaaaaaaaagcagaaataaagttaagtactacaaaaagatgcttgctgtcatgggtaaacaactctgccactggatctcaaacatgatagtatattagattcaccttcagtgattctgaaaacacagatgactgggctccaaccctggagtttccaatttactacatcaaagaataggggaaggaagatgtatatttcttacagcacaaagctgatgctgttgatgaagtttccaggattaccacagtaaattaaaacatactacagcagggactgttactttgggactgtctctgttattccccactgttttcagaattgacaagcaagcatgtaacatacatctgccctataacaggctacaagaaatgatgctagtgtttatttttatttttaatgtatttttttttagacgaagtatcactgtgtcgccccggcaggagtgcagtggcgcaatctcagctcactgcaacttctgcctccttgttcaagcaattctcctgtctcagcctcccaagtagctgggattacaggtgcctgccaacaagtctggctaatttttgtatttttagtagagatggggattcactattttggccaggctggtctcaaattcctgaccgcatgtgatctgcccgcctcggcctcccaaagtgctgggattatagatgtaagccaccacaaccggcctagtcttcatttttaggatttttttttttgagatggagtctcaatctgtcacccaggctggagtgcagtggtgtgatcttggctcactgcaagatccgcctcccgggttcatgcaattctcctgcctcagcctcccgaatagctgggactacaggtacctgccactatgcccacctaatttttttgaatttttttagtagagacggggtttcacagtgttaggcaggatggtctccatctctggaccttgtgatccgtccacctcagcctcccaaagtgctgggattacaggcatgagccactgcgcccggcctagaattttttttttaagagacaaggtatcacaatgttgcccatgctagtatcaaactcccaggctccagcgattctcccacctcagcctcccaagtatctgggactacaggtgcaggccaccatgccaagcatagtgatgttactcttacccacagaggccaggttcatgtagttctccagcatcacatctctgtagaggtatttctcagttgtgtccagtaaagcccactcctctggggtgaagtccacagccacatcatcaaacgtcactgaatcctatgtcatcatacacatgctggtttgagccaatgaacacttccaccaatattcactggagaatgatgaaggggaaccttatactcacttacacgtggttgtcaggtctcccatgatctactccagggtttaatgtctcaggagctcttgtgtctaaacactcaaggttgacctcctacaggcatatgccttaaacagcactttttaaaatttttttaaatctttttttgctgatctatttttaattttttaatatttgtatttttaaattttaaattttatttttattttgattagaacagtacttcctaaagatgaattttcctctatctatcatctatctaatctgtttatttatttatatataaaaacagggtccaactgtgtcacccaggcacaactgctgattactacagcttcgatctcctgggctgaagtggtcctctcacctctgtctcctgagtagctggaattacaggcatgagccactgcacactgcttacgcttgatctcagcacaaccaggctaggagctcttcctgtcccattggtgtctatgcagcacactcctcagcacactgcagatacctgataaatgctgataagtgaatgatttgataaaaggacactttcatctgctttatcatccgtcaccgcacccagcaatgtaagaaagatgcagttggcaccatgaaggtcaagcttaagtagtaattactgagctactggactgattttcaagttaacattttatgtataggagacttcattccctggggaaattcatctggggactcagtccttgagtaaggcttcatttgctctaagaaaactctgaagatgagtctgtctagaaagaaatctgtctacctattggatgaaagcatatcatttttaacaacagtacgttttctgcttacctgataaccacttgccaggtagtcctccaccatcctttctacctttgtcttttcttcaaaagggcagattggttccctggaaaaaaaccctagtggaaaagtaagaaggcatgagaagccagagctgcccatccttcccacattctcatgcctagaagtcattccatcctagcttgaaattccgatatgctcctacacactcgagaaaactacacacacaacacttccatgaaatgccatagtaagtcctgtgtcagctagacacaaaagcagacttgggccaaactgcctgttgggtaaagggtaatagtttcatttttcaaggaaacttacaccctgaaaaatgtgactctcgtccaggtgcggtgcctcatgcctgtaatcccagcactttgggaggccgaggcgggtggatcatgaggtcaggagaacgagaccatcctagctaacacggtgaaaccccatctctactaaaaatacaaaaaattagccagatgtggtggtgggcatctatagtcccagctactcaggaggctgaggcaggagaatggtgtgaacccaggaggcggagcttgcagtgagccgagatcgtgccactgcactctagcctgggtgacagagcaagactccgtctcaaaaaaaaaaaaagtgactctctatctgcccatagtagtaacactcatgaagcttatgtagcatttcctaaggtacacaaaccagggctgaattctaaaacagcattctggctgggcacagtggctcatgcctgtaatcccaatactttgggaggccaaggcgggcaaatcacttgaggtcaggaatttgagaccagcctggccaacattatgaaaccccatctctactaaaaatagaaaaattatgggaggctgaggcagagaattacttgaacccaggagacagaagttgcagtgagtcgagaccacaggcactgcactccagcctgggagacagagtgagattctgtctcaaaaacaaaaacaaacaaacaaacaaaaattagccaggtctggcagtatgtgcttgtggtcccagatacttgggaggctgaggcaagagaatcacttgaacctgggaggtgaaggttgcagtgagctaagattgcaccactgcactccagcctgggtgacggaacaagattctgtctcaaaaataaataaataaataaataaataataaaacagcattctgttctgtggttcacttcaattcctcctaaaagaaccagctgcatgcctgctcaggctcagctcactggacgcttgtgttgtggagggtgacctaaagcagaatctctgaaaaagagcatcaacaaagacttaccacgggacaaataaatggctgccattctctgaagctgatggtgtgatgatgtgcatcccttccttgatgccaagatcacctcaggccagcttatgaatctaggtggatagaggcaatctccattcctctttgtacagggttatttgcggtcctgttcatatcaatcatcaaacaacaagcatgaaacatcagtcatcaaacattatgcctgagctttgtctctgcaggtgacagatgtgaaggccaccaaaaattgcccactcagtaccgtcactcagtaacaaaagtattaataacagtaactgacatttactgaggactgatatgtcagaagtagctctagtagctttatatatacatgctcagttaattatcatagccatccttcccagtagctatcattacctctatctatctatatctatctatatttatctatctatatctatctatctatatatctatctatatctatctatctatatctatcctatctatctatctatctatctatcgagacagggtctcactctgttgcccaggttgaaatccaatggcactaacacaactctctgtagcctagacttcccgggctcaagtgatcctcccacttcagcctcctgaatagctgggaccataggtgcgtatcatcactcattattattattattattttgagacagagtctcactctgttgcccaggctggaatgcagtggcatgatctcaactcattgcaacctctgcctcccaggtgcaagcgattatcaggcctcagcctcccgagtagctgggatttcaggtatgcactaccatgcctggctaatttttgcatttttagtagagacgcagtttcgccatattggccaggctggtcttgaactcctggccttaagtgattctcccacttcagccccccaactagctgggactacaggtgcacaccactgggtccggctaattttttgtagttttagtagagacaagttttcaccagattgcctaggctagtctcaaactcctgggctcaaacaatcctcctgacttggcctcccaaagtgctgggataataagcataagccacgatgcctggcccattacttctatttaatactgaaaaaaacctacactcaaacaaccctagtagtcggtctgatacttgtccctagagcctgatctcctgtatatggtgttacccccccgccatatgaccagaagacagtgcagacctgcacagaacaattcagtagtcaccagccacgtgtgttattgataacttcattacgtacctaagatgacttaagaacaaaatctaaaattttcaaaagtcggccgggtgcagtggctcacacctataatcccagcactttgggggaccgaggcagacagatcacctaaggtcaggagttcaagaccagcctggccaacatggcaaaaccatctctactaaagatagaaaaagtagccgggcgtggtggcacttgcctgtaatcccaggtactcggaaggctgaggcaggagaactgcttgaccctggaggcagaggttgcagaggttgcagtgagccgagagagcgcgcagcctctccgaactggacgcacagggaggactgatagtccctggagaagcgagtgaagtgaagcggatctgagaggctcctaggcgacagcgcgcaatcattcctttgccgccccctgctatccccgggaccgccaaggaggtggaactcaccacagcctgggcagactccaccaccataaaggcgaaaccgcactgacggagaggagccagcgccggaaaagatggcggtggtgcgctgacgtcacttccgcttcaacactctggccgggcgaggctcgtgggctccagtttcagccacgtaggaccgggtagaacacagaaattctagtttcctctcgggtgggtgcagaaagggcctggggttggctcagggagggggatgcagaactaggtccagagaaaaaggtgaggttagaaccgggcctccagacggaactgtgggcgaggggaggggctcgtactcggggggtgatttagaggagggacccggcctagccggtggttcaggtggccggtcgggctggaagggcggggatgagggatgggacgcatccccgggggatgctcctccaaagcttttatcgggcgagcgcagtggctcacgcctgtaattcctgcactttgggaggctaaggtaggtaaatagcttgagtctgctgggaatgggtgctcgcttggtgtcacaaaatcaacactgagacaaaggatctcagcaaggctagttttactttctgcagaatgggtgccactggctggcagtcttgccaccagagcacacattaacaaaggagacagggtttttttaaacttgaagtgtccatccttctgctgtgtccagcttccattggctggaacgggacctcaccttcctgtacttcactggattggctagcaacttagaacttcccaaaagaggcaatggcagaggagaacaaaggaagagaggaagtaacttgtggactgttgagagaggcaaaaacacttctaaatagggaaaggaataggccatgacctaatagttgcttggaccagttcaggcatgccagggcaaatatctaggctaaaatgtgggagctaaaaacagagtctattgatttctttattacggctggcagaatttaacaatattaccacaggtctttgagaaaatttggcttctaagagggattactatttatttcaatcagactgggaggaaagtccctttgaagaggaacctgtatttatttcattttctacaagtccaagagtttgagaccagcctgggcaaagtagcaagaccctgtctctctctctctctctctctctatatatatatatataaacatatatgtataaatacatataaatatataaatatataaaaaatatataaatatacatgttcaaaatgcttgttccctggtgccataaagaaattagcacttgaacataaatttaatttactcagcaaggccatttttacttcctgcagaaacggtatactcaccagcagttttgccacgagagtacaccaaacaaaggagatagggtcatttataacctgatgcttccaacctactgctgtgtccagtttccactggctggaatgggacctcacgttctggctagcaacttataactttttaaaagaggcaagggtagaggagaacaaaggaaggaggaagtaacttgtggaatgctgagaagggtcaaaacatcttcaaataaggaaaaagaacaggctatgccctaatgcttgcctggaccagtacaagcatgccagggcaaatatgtagactaaactgtgggagctaagaatataaagtacattgatttctttatcacggctcacagatacttgagaatgttagcacaggtctttgaataaattttgcttctaagagaagttactatttattcctaattaaatgtgaaggaacgtctttgaagaggaacctctgctttactttttagatataaatataaagcttgtttgtatgcctctcctcatgttcctagagcctttccatgattcttccatattgataaagctgccaatgaatggcatggtctatcccttccattcagtcagagtttctgtaggcctttttttcttcattctttattttttagaacctgctgattccattgggttttctttttctttcttgcttgcttgcttgcttgcgacagatctcactggatcagaccaggctggagtgcagtggtgtgatctcagctcaccgcaacctccacctcccaggttcaagcaattctcctgcctcagcctctggagtagctgggattacaggcgcctgccaccacgcccagctaatttttgtatttttagtagagaacgatttcaccaggttggccaggctgatctcgaactcctggcctaaaatatctgccaggccaagatggtaggatcgtttaaggccaggagtttaagacaagcctgggctacacagcaaaaccccatctctctatatatatataaaaaaaatttaaattaaaaaatgttttgttttgttttgtttttttgagacatagtttcgctctgccacccagactggagtgcagtggtgcgatcttcactcactgcaaactctgcctcctgggttcaagccattcttctgcctcagcctcctgagtagttgggactacaggcatgtgccactgcgcccaactaatttttgcatttttaatacagacatggtttcatcatattgacccagctggtctcaaagtcctgacctcgtgatccatccacctggtcctcccaaagagctgggattacaggcatgagccactgccccagccaaaaatatgtatttctgttgttatttttctgatcttaccacatgggccaggaacacatttcctacgttgtaaaatagcactgataccagacattctccccaagattattcagaaatgtaacatactcccaataaaaataccaaaagtttttttctggagttaagtacattgatactgaagtttatgtggaggaacaaacatctgataataaccaagaaaacaaaaacaaaagcaatgatgagcagcagatattaaaacatactattgacagttttcatgcaaggcaaagaattacattattttaaaataaaaataaagtccgggcacagtggctcacgcctgtaatcccagcaatttgggaggccgaggcaggcaaattacctgaagtcgggggtttgataccagcctggctaacatggtgaaaccctgtctctactagaagtacaaaaattagcaagcgtggtggcacatgcttgtaatcccagctacttgggaggctgaggcaggagagttgcttgagcctgggagatgaaggttgcagtgagccgagattgtgccactgaattgcagcctggctgacagagtgagactctgtctaaaaaattaattaattaattaatttaaaaaacatactataaagcctctataattaaaactatgtggtactagcacgtgaaacagaaactaataaaatatcaaaaaatagacccatgaacatgtagaaatttggttcataaatgtattttgccagatgcggtggctcatgcctgtatcctagcaatttgggagactgaggcaggaggatcacttgaggtcaggagttcaaaaccagcctgcccaacatggtgaaaccccatctctattaaaaatacaaaaacatagccgggttcggtggctcatgcctgtaatcccagaactttgggaagccgaggcagccggatcatgaggtcaggagttcgagactagtctgaccaacatggtgaaatcccatctctactaaaaatacaaaaattagctgggtgtggtgatgcatgcctgtaatctcagctactcaggaggctgaggcaggagaattgcttgaacccagaaggcggaggttgcagtaagctgagatcgcaccactgcactccagcctgggcaacagagtgagactctgtctcaaaaaagaaaaaaaatttagccaagcatggccgagcatgctggctcatgcctgtaatcccagcactttgggaggctgaggcaggcagatcacgacgtcacgagatcgagaccatcctggccaacttggtgaaaccccgtctctactaaaaatagaaaaattagctggcatggtggcgggtgcctgtaatcccagctactcaggaggccgaagtaggagaatcgcttgaacccaggaggcggaggttgcagtgagccaagatcgctcccctgcactccagcctggcgatagagcgagactccgtctaaaaaaaaaaaaaaaaaaattagccaagcgttgtggtgggcgcctgtaagcccagctactcgggtggctgaggcaagagaattgctcaaacctgggaggcagaggttgcagtgagccgagatcacgccatttcactccagcctggcgacacagcgagactctgtctcaaaaaaaaaaaaaaaaaaaaaaaaaaaagccgggtgcattggctgatgcctataattccagcacttttggaggcagaggcgggtggatcacctgaggtcacgagttagagaccatcctgaccaacatgaagaaaccccgtctctgctaaaaatacaaaattagctgggcatggtggcacatgcttataatcccaggtactcaggaagctgaggcaggagaaccgcttgaacccaggaggcggaggttggggtgagtggagatcgtgccattgcattccagccagggcaacaagagagaaacaccgtctaaaaaaaaaaagtggcatttcagataaatggggcaaaaaatgccatttgtaacaaatggaaggtctaagatagctggttagccatctgagaaaagatgaaattaaatccatacttcacagcatatacaagaataaactccaagtggactagggatctaagtgtaaaaaataaaaccacacacgtatttagggtgtttaagtgatttcttggctgagtaaggaaaaagatgttaccacaaggcggcagtagcacacaagcttcatttgggatgtgctttgacaggttagcagtgggggaggtagcaaacagcaagagaatatccacaggcttctacctgtgggtcgctgctcagaaagggtggaaaggaagaaagactctcagaggagaaggggaatcaaagagggggcttataaataactaaatgatgatattcaccagactggcagcatatcttccagttaaaaagctctgaaggataagtctggccaatatggtgaaactccgtctctactaaaaatacaaaaattagcaggtatggtgccaggtgcctataatcccagctacttgggaggctgaggcaggagaatcgcttgaacccaggagatggaggctgcagtgagctgagattgtgcccctgtactccagcctgggtggcagagcaagaccctgcatcagaaaaaaaaaaaaaaaaaagctctgaaggaccgcaggggtatggggttttcatagccctggagttatcttatctatggctgtcagatattggatataatttcagagaatacaaagcaggcgcactcgaaatggctaaaaataggcttgttcaggctatgtttcaaacaatccagtgtgttaaaattgcagtttggcaggggtaggctattgtgaatactagtgagacaaacattggtgtacaaatatctctgagtccctgctctgaacagttttggatatgccaaagtggaatatctggatcacatggtaattctgtttaatcgttctttttttttcttttttttgagacagggtctcactctattgtctaggctcgaatgcagtgacgtgatcatggatcactgcagtcctcaacttactgggctcaggtaatcctcccacctcaacctcccaggtagcagagattacaggtgcatgccaccaccatccttggctgaattaaaaaaaatttttttgtaaagaccatatttcaccatatgcccaggctggtcctgaagtcctaatctcaaggaatcccctggcctcagcctcccgaagtgctgggattacaggtgtgagccatcacatccagcatggttttgattttcattttcatgatgtttagtgatgttgagcatcgtttcatgagcatcttttcgtgtgtttattggccatctgtatatcttctttggtgatattattcaagtcctttttctgtattgaaatgagttttgttgttgttactcttgggttctagaaattttaaaaataaactctggatatttgtccccagtcagatacaggacttgcaaatattttctcccatttgtagattgtctttttactctcttgttattatgctttgatgcacaaaatttgtatcattgattaggttcaactcataatttttcttgtgttgcctgtgtggttgatgtcataactgagaagtcatttccagttgaagctttctcacctatgttttcttctaatagttttccagctctagctcttacactacactaaggtttttgatccatttttaaaaaatcatgccacattattattattattattattaagatggagtcttgctctgtcacccaggctggagtgcagtggcacaatctcagctcactgcaaactctgcctcccaggttcaagtgattctcctgcctcagcctcctgggtagctgggattacaggcgcctgccaccatggccagctaatttttgtatttttagtagagatggggtttcaccatattggctatgctggtctcgaactcctgaccttgtgatccacctgccttggcctcccaaagtgctgggattacaggtatgagccaccacgcccatccttcatccattttaagtaaatttttatatatggtataaggttagggtccaactccattcttatgtatgtctatatctcagttcctcccccatataatcctgtccccagggaatcaacaacccatgctcttcctagtcacctccttgaacatgtccctcccccaggaaacctccaacatgagatagaacaatgtagaaaggacattcaaaacttccctttcccttgtttgtcaaaggaatccgccccaacggttgtccccttaagggaagtcccactggggggagggggcattggttgcattaatgccctcttaaccagctcagaagtcagaaacttcaaaagggaactcaaaccattgttagatgacccttattgggtagcagatcaaattgatcaatttttagggccacagttgtatacttgggctgaactaatgtccattttagatattcttttctcaggggaggaaaggactgtgatccacagggccactgtgatagtcagggaacgtgaacatcctcctggccaaaacgttctgcagcggaccaaaaatttctgttccaagaccctcaatgggacaatcacaatgcagctcaccaagaaaatatgagggatctcggggaaatgataattaaaggaattcgggaaccagtaccctgaactcaaaatatttcccgagcattcaacatacaacaaagaaaggaagaagagctcatggaatttttaaacagactctaagagcaagttagaaaatacgcaggcttagaaataagaagatccacttcggcaaggattgttaaaactccactttgtcaccaacatttggccagaaattacaaaaaaattgtcaaaaaaatagagaattggaaagatagctccatagaagaacttctaaaggaggcccaaaaggtatatatgagaaaagacaaggaaagcagaaacaaaaagcaaaaattccactgcccacccttcaacaagggacacaaggaaataggtcccataaatgttctaagccactagctgcaaagtcacatacaggaaagaaaagggataaaacctggggacctaacggcaagaagggaaaagggggaaaataaatgtttcagatgtgggaaactgggacactttaagacagaatgtcccgaatgagaaagagagagaaatcctcccactcatgacttttgaagaagaatagggggttcagaggctctgtctcttttatctcaaatcccaccaatagcccttgataaatctacaggtgggacccaagctagaaattttcactttcctaatagattcaggagtagctcgctcctctgtttgctacctttcatcaaatgtagcctgctctgcagaggagctgttcgtcacggtggtaaagggggaaaggtttagaacaaaaattttggaggaaacagaagttaaattcaagaatagatcagccgccattaaattcatgttaatccctgatgcagggacaaattcgttaggaagggacttaatgtttaaattggggataggtctatatgttaatcagggaaaattatttacttccttaaacttgcttaccgcccctaaagaaagccaaatccaccctgatgtgtggttaaaggagggaaatcaaggaagattcaagttccgccaattcatataaaacgaaaacctcctggggaaatagtaaaaagaaaacaacaccccattcccctagaaggcagaatgggtttaaaacctataatcaaaggtctcatccatgacagactccttgaaccctgtatgcctccttataacactctaatgttgcctgtaaaaaagtcacatggatcacggctagtgcaagatatctgggctattaaccaaatagtccagactactcaccctgtggtccccaacccttataccattatcagcaaaatcccatatgaccaccaatggttcatggtaatagacctaaaagatgccttttgggcttgccccttagcagaggacagccaggacatgtttgctttcaaatgggaggaccctcactccagttggaagcaacagtactgatggacagtcctgccccaagagtttgtggactccccaaatctatttggtcaaattctagaacaagtcctagagaattttcccctcccctcatccatatatccgctccaatatgtggatgacctgctaatttcaggaggcaccaagggctgggtaacagcagtatcaattaactttctaaattttctgagggaacgcggattgctggtctcaaggagtaaactcgtttgtggaacctgagataaaatacctaggatacttaataagcaaaggcaaacagagattaggccccaaacgaactgaaggaatcatagccgtacctttgcctgaaacaaaataagggcttaggaaattctgggggttgactggatattgtcgcttatggattgactttatgctttaaaaacaaagcctctatgcctgaaacttactcaagagagacctgatcctcttctttggacaccacgggaggtccaacaagtagaggaattaaaacacctgctcataactgccttagttctaccttccctagaacagccattccacctcttcgtcaatgtgaataaagggatagctctaggggtgctcacccaaacacacgggggccaccggcagcctatagcctttctgtcaaaaattcttgacccactaacccacaggtggcccgagtgtatttaatctgttgcagcaactgccctatttacagaggaaagcaggaagataacctttgggggaaacctcactgtaaacacaacccatcaggttagaaccatcctaaaccaaaaagcaggcagatggcttaccgattcaagaatcttaaaatatgaagctatcttactagaaaaagatgatttaaccctaaccacagaaaaaacactcaaccctgccgctttcctaatgggaaatccaatccccaggaccctgaacataaatgtctggatctaatctgttatcaaactaaagtcaggcttgatctaagcgagaccccattcaaaacggggcaacacctgtttatagatggctcctcccaggtatttgaagagaaaagacacaatgggtactcggtagtcaatggggaagccctcacagaggtaaagtcaggaagactgcccaataactggtccacccaaacatgtgaattgttcacattaaatcaagccataactgggaaagggactatttacactgactccaaatatgccttcggggtagtccatacttttggaaagatctggactgaataaaaggccaggaccttgtccacaaggagttaatcactcaggtattggaaaatctccagctaccagaagagatagccatcctgcgtgtcccaggacaccagagaaatatttctttcaaaagccaaggaaataaacttgcagaccaaatagccaaacaagctgcctcttctcccaaaatgcccatttttcacctaaccccttgtctttcttccccaactgcaattcacatcttctctcccactgaaaaagagaaattaaggaaaataggagctaaagaaaactcagaagggaaatggatgttaccagaccaaagagaaatgctatcaaaacccctaatgagggaagtcctatctcaactgcatcaagggactcattggggacctcaagctgtgtgcgatgcagttctcagagtttatgggtgtataggagtttataccctagcaaaataagttacagatagttgcctaatatgtaagaaaactaatttaaaaaaaccctaaggaaaccaccttttgggggaaaaagcccaggattgagaccattccaaagtgtccaaattgactacaccaaaatgcccccaataggccacctaaagtacttgctagtaatagtggaccaccttactcactgggtggaggctattcccttttcaagtgcaactgctaataatgtgattaaggcattagtagaaaatattatacccaggtttggactgatagaaaacattgattcagacaatgggacccacttcactgcacatgtcattaagggactagcctaagtactaggaataaaatgggaatatcatactccttgcacccaccctcataaggaaaagtagaaaggatgaaccagactctaaaaagccacctaaccaaatcaattttagaaactcagttactatggactaagtgccttctcactgccttattaagtgtctgaactgcccctcagagagatgttggcctatctccctatgaaatcctatatgggttgccttatctacactctactactgacattcactgaaacaaagtttgtttcatttgaaacaaaggatcagttcctcaaaaattatatactcgatctgtcttccactttctcttccctcaggatgaaaggcttcctagcacaaacaccacccctggagttcccggtacatcaataccagcctggggatcacgttctcatcaagagttggaagagggaaagcttgaaccagcttaggaggacctcatctggtactcttgatgaatgaaacagcaatctgaatggctgaaaaaggatggacccagcactccaggtaaaaaggaccccacccttacagagtcatgggctgtcactccaagaccaatgccttccaagttagtattcaaaagggtctaatctgtctttcccttcttcccttaactactcaaggacacttcattatcaatgtaaccagatcactctctcctcaaacaatcacgtttgacgcatgtcttgccatacactttggggacctccaaaaccagaagcagctatcctccttgtagaaatatctctgtccttccagggtagattctaacctcttacattcacgcaactcttgcttggtagaagccgaaacccttacgttttgggaaaggttctgctccacctggaacaatgtcctatggactactaagcatcaagggtggacctccccaggaagctgcgcctctttaaaaccatatcttcgtttcaccaaaggaaatgccccctctaattgccaacatcatcaatgcaacccagtgcaaatttctatcttacccctacctccatcgatcttgagcccactttaggtcttttctatggcataggaaccgaagtgggctgagacagatcccatagggtcctttgaaatgcgctttagcaacccttccccacctcctaggggtaacccctctccaaaccctcctccaaatcaaacaactattttgccactacctaatgacaaaactaaagtggtcatagtggaagtcaaagacttaaaccctagccattgaaaccgggtatcaggatgcaaatgcctagctggaatggattaaatattccgttcatactctaaacaaaagtgactgttacgcttgtgcaacaggtaggccagaaacaaaaatagttccttttctgcttggatggtctaaccaaccgggtatggactgcatggtagctctttccagcatcccacagcctggggtaataagtcatgcggcactctcttactgcttttcccagaagtgaaagaccgccctgtgtgtcagcccccaagggccatccagctcccagcgtctgatgccaatttttcctcatgtctctcacaacagggagaaaacttggcattctttgggaatctaacaggatgcagtgaacccaagccttttgaagagctcaccaatcagactgcccttgtctatccatgagcagatgtttgatagtattgcggaggccctctagtgggtatgctgccaagcaactggagtggcacttgggctctaatccagttgtctatccctttcaccctggcatttcatcagccaaacaaaaaccaactaactcagaaaaaaaggaaagcccctcaagggtcctttgaccccgatatctacatagatgctatcggggtcccctgaggggtaccaaacgaattcaaagctcgaaatcaaatagctgctggattcaagtctgtccttttcttgtggtctactataaataaaaatgtagactggataaattacatatactataaccaacaacgatttgtcagttacaccagggatgccattaaaggaatagctgaacaattgggtttcaccagccaaatggcctgggaaaatagaatagctcttgacatgatattagtggaagtccaatgttgtacctgtatccccaataatacagcccctgatgtaactatcactaagggtctataaggcctcaccactctaggaaatgaactagctgaaaattcgggaatgaatgatccctttacaggtgtaatggaaaaaatggtttggtagatggaaaggactaatggcctctattctcacctcccttgtgatcataataggggtgctcattctcttagggtgctgtattataccctgtgtctgcggactagttcaaaagctcatagaaacagcccttaccaagacctcccacaactctcccccaccctattcagataaacgtttatttctaagcaaccaagaagagcagtgaagccagatcctgttagaaatatatgaagaggaaggactacaaaatcaaaaggggaaaattattagacaaaatgagttgctctacaaaggtccaacttcgttgtcctttgttctgtaacctttgttctgtaaactgcccttcccgcagaaactgtctttcccgccgaccaaaactgcccttcactatcactgtaatccatacccctactctatttgaaactgccaatcgggatcagcttacattgtgtggttcaaccaccagccaatgaggaaaaaacacagaagcaaaagctatgatgcattagggttaaaaaccccttcctttccctgtccaatgtgctcttgagactgctacaggcgcaagcagccaccttctgcagaagtaaaccttgccttgctgagaaatttttcttttgagtgctggtctctctctgtggcaccaagaacttatttctaacatggagtgatttccaagatagatggttaagtgaaaataaaaactgttgccaggcacggtagctcatgcctgtaatcccagcactttgggagtctgaggaggttggattatttgaggtcaggagtttgagaccagcctagccaacatggtgaaatcctgtctcttctaaatatacaaaaaattagccgggcgtggttgtgggtgcctgtaatcccagctacttgggaagctgaggcagaagaattgcttaaacccaggaagcagaggttgcagtgagccgagatcacagcactgcactccagcctgggtgatagagtgagactcggtctcaaaaacaataataataataataataatacaaataaaaaaatgaaaataaaggccaggtgctgtggctcacccctctaatcccagcactttgggaggctgaggcaggtggatcacaaggtcaggagttcaaaaccagcctggccaagatggtgaaaccccgtctctactaaaaatacaaaaattagctgggcacagtggcaggcgcctgtaatcccagctacttgggaggctgaggcaggataattgcttaaacctgggtggcagaggttgcagtgagccaagatcatgccactgcactccagcctgggccacagagtgagactccatctcaaaaaaaaaaaaaaaaaaagaaaagaaaaagaaaatacataattatctgtttattctgagtatagggaaacactgataggattattctgaaaataataagattcagaatctattggggatggatgggaacagctagaacagaatggtggggtaagaacaagatggaggctgggcgtggtggctcatgcctgtaatcccagcactttgagaggctaaggcgggcggatcatgaaatcaagagatcaagaccatcctggccaacatggtgaaaccctgtctctactaaaaattcaaacattagccaggtgcggtggtgcatgcctgtagtcccagctactcaggaggctgaggcaggagaatcacttgaacccagaaggtgaaggttgcagtgagctgagattgtgccattgcactccagcctgggcaacagagcaagactctgtcccaaaacaaaaacaaaaacaagatgtagaggatagggaaagggaaacctctctgagctctctgagcataacattctgttagttcttattacgcatgtccaagtaaagagaccaccaagcagtctttgagtgagcaacaatggctgtgtattacatccgggtgtggacgggctgagtctgacaaaacagtcagcaaaaggtggtgggattatcattagttcttataggtttgggataggtagtggaattaggagcaattttttttgcaggcaggaggtggatgttacaaagtacattctcaagggcggggaggatgttacaaagtacattgacaagggtggggagggtgtattgtcacaagggtggggtacattcacaagggcagggaggatgtatcctacaaagtacattcagaagggtgggggaatatcacaaagtacattatcacaagggcagggggatgtcacgatggcttgatcatgatgcggccagctcagaggaccttacattcctgcctttttatgttaataatgcaggtggactgcaggtggggtactatagatgactaagtagggtctggtccattgaggttgtagagtttgaggggtcaaattcttaacaagaactgattgtccagctagggcgtcttcatatggctgggaatctggagtaggcaagagaagattagcagcctggcgaatttcctgtctagcctgctggaggactggaagatagtcacctagagggctggtgtctggcaagaggttggggcctaacaagaaggtatgtccatataaaacttcaaatggactataccctgtagcttcttgaggataggctctaattctaaagagggcaaatggtaacagtactgtccagtcttttttaagttggagactgagcttggtgaggtgtgtttttaacagactattagttctttctacctttcccaaagattgaggatggtaaggggaatggaggttccactggatgccgagggcctgggagatggcttgtgtgatctgactaatgaaggccagtctgttattggactctatagaggtgggaaggccaaaccgaggaattatgtctgacagaagggaagaaatgaccatggtggccttctcagaccctgtgggaaaggcctctatgcatccagtgaatgtatctacccagacaaaaaggtatgttagttttttgactcagggcatatgagtaaagtcaatctgccagtcttgggtgggggcaaatcattgagcttgatgtgtaggaaagggagggggcctaagatatccctgaggggtggtagagtaacagatggaacaccgagaagtaatttccctgagaatggatttccatgatggaaaagaaatgggaggttctaagagatgggccattggcttgtaaccaacatgaaagaggttatgaaaggacgataagatagaatgagactgtgaggcaggaaggaggaattttccttgatccaagaaccatttgccttgagtaggaagggattgataggtcatagttttagtgggagtataggtggaagtgatagatgagaaggaaaaaaaatggccatgagggacagatgtgggaatactagctgcttcttttgctgcattatcagcataagctttgccttgagcagtgggatctggtgacctctgaggccccttgcagtgaatgactctggcttccttgggcagtagagcagccttaaggaggatttttattaaggaagcattgatgatggaggacccttgtgtcatgagaaaaccttttcctgcccatataatagcatggtgatgtaggatgtggaaggcatacttggaatcagtgtagatattgacacatagtccctttacaagggtgagagccccagttaaagcaatgagtttggcttgttgagaggtaatggaagggtgcagggcagtagcttcagtgaccgatgtggaagacaatacagcatagcctgcccttgttggtgaccgacgatttggccttgaactaccatcaataaaccaagtgtggtctggattagcaacaagaaagagggaaatatggggaaatgtggaggatgccatatggattagagagatacagtcatgaggttcaggtttggtgctaggtataaggtgagaggccgagttgaagtctgtgccaggaacaatggtaattgtgggagtttcaatgaatagtgagtacagttggaggagtgtgggggcagaaagtatatgcaccaagtgtgaggaggaaaatagattttgaaaattatgagaactgtagagtaagtggggcatggtttgtgatcttgagggcctctgaaagtattgaagtggtggctgccagcacacatagacatgaggaccagcctagaactgtgaagttaagttgcttggataggaaggctacaggctgtgggtctggttcctctgtaagaactccaaccacacagccttgtatttcagccgtacataaggagaagtattgggatgagttagggagtgctaatgtgggaactatttctagggctgtctttaaggaatgaaaagaagggtgggaaaaacttaggttctatggggttggtcaggtttccctttatgagtttatgtaggggtttagttaggatggcaaaacctggtatccaaaggcaaaagtatccaaccatgcctaggaaggaaaggagttgttgctttgtagaaggggttggggtttcagagattagctggacccagttagcagggagaacacgtgtgttttgatgacagactatgccaagataggtaatggatggagaagaaatttgggctttagagggggatacatgattcccctttgagaatagatgttgaaggagcaggagggtatcctgttgggaagattcataagaggggatgcagaggagaaggtcgtccacatattgaataaggtgagaaacagatggacagaaagaaagtaaatcatgagaaagagcttgactaaagtaatgggggttgtctctgaagccttgtggcagtacagtccaggtaagttgctgagattggtgggtgacaggatcagtccatgtgaaagcaaaaagaggtcgggatgaggggtgcaaaggaatagtgaagaaagcatctttgaggttgaggacagaataatgagttgttgagggaggtattgaggataggagagtatatgggtttggcaccacggatggataggttagacaatttggttaataaagcaaagatcctgaaccaacctgtaagatttgtctggtttctggacaggtaggataggggagttgtaagaatttgtaggctttaaaaggccatgctgtaacaggagagtgatagcaggctttagtccttttaaagcctgttgtgggatggagtactggtgttgagtggggtaagggtgattaggttttaatgggatggtaaggggtgcctgatcagtcaccaaggagggcatagtggtatcccatacctgtggattaaggtagggagacatgagacgaggatgcaaaagaggcttggaatcaggcataaggacagcaatgaggtgtggctatagtccaggaatagtcaaggaagcagataatttagttaaaatgtctcagcctgataagggaactgggcaggtagggataactaaaaaagagtgcataaaagaatattgtccaagttggcaccagagttggggagttttaaggggtctagaagcctagccatcaatacccacaacagttacaggggcaagggaaacaggcccctgagaagaaggtaaagtggagcgggtatcccccatatcaattaaacaggggatggacttaacctccactgtaagagttacccaaagcttggtgtccatcatggtccagggggcttctgagatgattgggcagcatcagtcttcagccgctaagccaaggagatctgggaaggagtcagctaaggaacgttggatttgagctccaggagctttaggagtggtggtcatgtgagtcagagagtctgacttccagtgggggccctcacagacagggcacggcttacaaagaatcccaagatatggtggcacttggcagctttttcttggttactgaacaccttgaaggcgaggttgattaaatcctgttgtggggcttgagggctggaatccaatttttggagttctttttctaatgttaggagtggattgggtgataaaatgcatattaatgataagggggccttctgtcccccatgggtctagggctgtaaagcatctaaaggtaactgctaattgggccataaactgggctgggttttcgtctttacattgggtagttttctttagcttgtcataattaacagcactgtatgctgcctttttgagcccctcaactatgcaggagaccatgtaatcttgcctagctatacctggggattccgtctggtattgccaatggggatcctctcagggaattgccctggtgccctcttggaggtctggctcatgaagccagtgggtgtctttgtaggactgggctagaaaataaactctttctcgttcgtctgggaagggggtaaaggtcaggatgacatttaagtcactccaggttaagttgtaggactgagttagatattggaattcctgtatatatttagtggggtcctatgagaaagagtctaaatgctggctcatttgggaaaggtctgatagagaaaaaggcacatgtaccctcactatgccttcagctccagccacctaagaggaaatttttgggcatgtgggggagagctagtcacagaacaaaactataagccagacagggtgtgaggaggggaggtaatagaagcgttatagggtggggtagcagaggctgcagaagaattgggacccaattcagcctggcgaggagcagctgggggaggaggagagaggtcagaggggtcagtggaaaaggaggattcagaggactctgagcttggggtggagaacaaagaagcagacgggagagaaagaaggaaaatctgggacaagtctcattgggagcagaaactagggagggagtaaagtgtaaaaaatgcctggacatcaggcatctcagaccatttgcccaattttcaacaaaaattatctaggtcttgtaggatagacaaatcaaaagtgcctttctctggccacttggaaaaactgtcaagtttgtattggggccaagtggtattacagaagaaaacaagacgttcaggttttaggtcaggtgttagtcaaaggggtgttaggtttctaagaacacaggctaagggggaagagagaggaatggaatgcagaaggttgcccttagtggagaaggtaagtttaaagaggaaggtagacacatggagaaatggaggtgggcagctaccagtcttccagtaggcatccctgactgagtcctgggctttaatgtgggtgagcagccaaagcaggcatccctgcaattgacctgccatcaagggaatgtgggtgaatgatcaaggaaggcatctccgcagtgatcaaacgccaagggaagactgtcttcccaagtccatgaccaacatcggagtctttggatgcacggataaaatgtgtctgctttttgtctctactaggaagggagagaaactgaaactgaaagaagagagattgaagggaggtgagagaggttaggtagagagcaaaaaaaccgcttatccaagtgcaaaaaaaccgcttaccgatttgaaattagtgagacgatccttgggctggctggtctgatgacccgaggtcataggtggatctcctcatggagggagtgtaatgacaggggatgggtctcctgaggagttctaatgtcccaggtttcagcacaaaatgttacatgcgtctgagtaaagagagcacctagcaggctttgtgcgagcaacaatggctgtgtattacatccggatgtggatgggctgtccaacaaaacagtcagcaaagggtggtgggattatcattagttctcataggtttgggataagcggtggagttaggagcaattttttttgtaggcagtggggtggacgttacaaagtacattctcaagggcggggaggatgttacaaagtacattcacaagggcggggagggtgtatcatcacaagggtggggaggaaggttacaaagtacatttacaaggagaggaaaggtgtactgtcacaagggccaatggcagggtacattcactaggtgggggaggatgtatcttataaagtacattcacaagggcaggggaatatcacaaagtacattatcacaagggcggggggatgtcacaatggcttgaccatggtatggccagctcagagtaccttacagttctgatgtttaaaattacattcttttttttctttaaaaaaaaaaaaaaaaacagggtttcactctgtcacacaggctgaagtatagtggcattatcatggctcactgcagcctttacttcctgggctcaagcagtcctttgcctgagtaccagggactacatacgtgcaccaccacatccagctaatttttaaaaatatattttgtagagaagagatctctctatgttgcctaggctgccctcaaactcctgagctcaagcgatcatccttccttggcctcccacattgttggcattacaactgtgagccactctgcttggccctttattcttttacatatttaattttttaaaaaatcaacaaagatagagggaaaacccaaaatggaatacgaacaggaacaatcaatctgaactttgtatcaaatgggtaataagactatgtaacaggaacaacacaacaacagttgctgcctagacattagaaatagaggccaggcacagtggctcaaccctgtcatcctagcattttgggaggctgatgcagaaggataacttgaacaggatttcaagaccagcctgggcaatatagtgagacacagtctcgaccaaaaaaaaaaaaatttaaaaataaaaaaattagccgggcctggtggtacatgcctgcattcccagctactcagaaggctgaggtgagaggattgcttgagcccaggaggtcgaggctgcagtgagctatgattgcaccactgcactccagcctaggtgacatggcaagacactgtctctggaaaaaaaaaaaaaaaaaaagaacaccaccggccactgtggctcattcctgtaatcccagcactttgggaggttgaatcaggctgaatcaggggggtctcaggagttcaagaccatcctggccaacatggcaaaaccccgcctctactgaaaatacaaaaattagctgggtgtggtggtgcacacctgtaatcccaggtacttgggaggctgaggcaggagaatcacttgaacccaggaattggaggttgcagtgagctgagatcacgccactgcactccagcctgggtgacagagcgagactctgtcattcataaataaataagtttagaaaaaaaaaatgtgtctgaaagggtcttgagcatccctctgggcaaattccaggcatcatccataatgatgaatgcacaaatacaaagatacgaatgagccagagccaaccttatattcctgcagtaaatgccactgggtttactattttcttatcaagcagttggaatttatttgctaatccgttccttcctagcttccttttttccttcttttttttttttttttaaatggagtcttgctctgttgcccaggctggaatgcagtggcatgatcttggctcactgcattttttaatttttaagttttttgtagatggggggcttgctatgctgtccaggcaggtctcgaactcctgagctcaagtaatccttttgcctcctttcaaagtgttgagactccaggcataagccactttgcccagttgctactattatacttagcgcatttttttgtttgtttgttttttgagacagtcttactctgtatcccaggctggagtgcagtggtgtgatctcggttcactgtaacctcctgcctcagcctcccgagtagctaggaatacatgcacatgccaccacgcccagctatatttttttagttttagtagatacaaggtttcaccgttttagccaggatcatctcaatctgaccttgtgatccacctgcctcagcctcccaaagtgctgggattacaggcatgtgagccaccgtacctggcttacttagtgaatttgtaccaatattcattaccaatataattctgtagtttttaatgactgtactgtttttatcagtgataaaaacgatacatatatacatcttgtactgcatcataaaaagatttagcaagatttgcttcattgttaatactctgaaaggatttatggagaattaggaccaattggaccttgaaaatgtcatgtaaagatgtctggctgggcatggtggctcatgcttgtaatcccagcactttgggaggcccagaagagaggattactctagctcaggagtttgaggacagcctgggcaatggagtgagataccttctctaccaaaataaaaaagtgtgagtttaggtgctgtgttccttgttgttgttacagtgtgagccaccgtgcctggccgagactgggtaagttatgaagaaaaagaggtttaatggactcacagttccacatggctggggaggcctcaaaatcatgacagaaggtgaaggaggagcaaaggcacatcttatatggcagaaggcaagagagcctgtccaggggaacagctgcttataaaactgacagacctcatgagatttactcactgtgacaaaaacagcacacgcctattatcccagctacttggctgactgaggcatgagaattacttgaacagcatggggaaacccccccccatgattctattacctcccacctggtctctccctcgacaccatggggattatgggagctacaattcaagatgacatttgggtggggacacagccaaaccatatcagctggcaacttgcttgcagctcataacatcaactgtttctttgggccttcagtcctgctgacttccggcctcctgagtccctaagcagaggaatacgaattcaaatcttgattttctcattgcagctcatagtgggagatgcccagtctctctgtgaacattgacagaattttttttttttttttgagacagagtctcacactgtcaccaggctggagtgccgtggcgcaatatcagctcactgtaacctccacctcccaggttgaagtgattctcccatctcagcccccaagtagctgggactacaggtgagtgccaccacacccagctaatttttgtatttttagtagagatgggggttcaccatgttgcccaaaatggtctcaatctcttggcctcgtgatccaaccatctcagcctcccaaagtgctgggtttaaaggcatgagccactgtgcctggcccagaattctttactgctaacacgagtgggcctggttctggaggatttcccagtgggtcctgaagaaccacagtttattggcttgtgggcaaaggggtatgtgtatcagttggcctttactgtgtaataaacagccacaaaaattactagctgaaaacagcagctacttaattagcagaagcctcttgaggatggacttgcaaaccaaagttgtgctggtttctactggtcaaagcaaggactggctcacataaaaaggagagagattgcaccttcagagagtaatctcaagacatctgtaatctaccacagggtgtcactgggcctctgtcaaggagcctattctttctgccaccagatctgtctaatagcttgtgtgacaatgcacttccttctgggtctctctccaagtgtagtaagtgtatatgggaatcactttattcaaacagtgtagtgcacttagttagaaagaaaaggtattaaggaagacttatatttaaaattgttatttatggtaacaacgaaaagtaacatacaaatttcaaacatcaagaataaaataaattaaaggtatgatcaatacacatcagtacaaagaggggaacacaatgaaacaaacaaaaaaaattagatgctagaaattaatccaaattattactaattaaatgtcaggcactaaatgtgcaacataaaaggattgttaattggtattattcaagtattttttctttttttttttttttttgtgacagagtttcactcttgttgcccaggctgcagtgcaatggcgtgatctcggctcactgcaacctctgcctcccgggttcaaatgattctcctgcctcagcctcccaagtagctggcattacaggcatgcaccactaggcacagctaattttgtatttttagtagagatggggtttctcagtgttggtcaggctggtctcgaactcccgacctcaggtgatcacctgccttggcctcccaaagtgctgtgattacagacatcagccactatgcccagcggtatacagattttttaaaactccagctaaagtatgtataaaaagacacatttttttaaaaagcatacagaaagactaagaagtagaggaaaatcaagctgatgtaactatataaatatctaacagaattagtggaacagaaaacatgcaagaaatagtgtagatttttcaagcgaaatatctgaaagaattcataaacctgggtactctctaccaagattaacacaagcaaagggaaagaatgcacaattaataagttattccagaatgcaaaaggagactgaagttatacaaccagcaaaaatgaaaaatataaaaagtataaatttttgctacacatttggaaataaaaacatgcctagaagaatattctcaaaatacttatgcaagccttagttgtctttttttttttttttttatgagatggagttttgctcttgtcacccaggctggagtgcagtggcaagaactcaactcactgcaaccttcgcctcccagattcaagcaattctcctgcctcagcctcccaagcggctgggattacaggcgcccgccaactcacctggctaattttattttttgaatttttagtagagacaaaagtttcaccgcattggccaggctggtctcgaactcctgacctcaggtgaccccctgccttgacctcccaaagtgctgtgattaaagccgtgaagcaccgtgcccaacctagttgtctttttttttttttttgagacggattctcgctctgtcgtcaggctggagtgcagtggtgtgatctaggctcattgaaacctccacttcaggggttcaagagattctcctgcctcagcctcctgagtagctgggattacaggggcacaataccgtgcccagctaatttttgtatttttagtaaagacggggtttcaacatgttggccaggatggtcttgatctcttgacctcatgatctgcctgcctcagcctcccaaagtggtgggattacaggcatgagccaccactcccagcctgataactgttttatttatttatttttatttttttggagatatggggtctgtgttgcccagactgatcttgaactcctggcctcaaggaatccttctgactgagcttcccagtgtgctgggattaaaagtgtgagccactatgaccagccagaagagataattttaactttttaaaatattttgcagtattggccgggcacagtggcttgtgcctgtaatcccagtactttgggagtatgaggcatgcagatcacctgaggtcaggagtttgagaccagcctggccaacttgatgaaaccgtctctactaaaaatacaaaaatcagccaggcaaggtggaggctgtctgtaatctcagctactcgggaggctgaggcaggagaaccactggaacccaggaggtggaatttgcagtaagttgagatcacaccattgcactccagcctgggcaacgagtgaaacactaactcaaaaacaaagaaacaaacaccaactcaaaaacaaagaaacaaaccaaaaaaatgaaaatatcttgtagtatttttaaatagagatgtggtttcgctatgttgcccaggctggtttgaactccttggctcaagggatctttttgcctcagcctccaaaagtgctgggattacaggcctgagccactattcccaacctagatgactcttatagattaagaatttagaaatagtaggaacatgccccactacagtatatgacagtcattatatacaaatatcattaagggacaattttttaaaaatcacaatgttattcaaacatagctccataacatattagtaaaggtcatgaagtatttttaagtgatccattatgtcacagtcgagcttatccaggaatacaaggttgatgtaacattggaaaagcaataaatacaaataccacatttatttaatttaatttatttatttttgacagagtcgcaccctgtcacccagcatggagtgcagtggtgcaatcttggctcaatgcaacctccacctcccaggttcaagtgattctcctgcttcagcctcccaagtagctgggattacaggtgcacatcaccacacccagctaatttttgtattgttagtagagatggggtttcaccatgttggctgggctggtctcgaactcttgacctcaaatgatctgcccacccccacctcccaaattgctgggattacaggcataagcccccacacccagcctgaccacatttgttttagaaaagcgcctttccatgcattcacttcttcaagttttttttttgttttgtttttgtttttttttttgagatggggtcttgctatgttgcctaagctggtctagaacccctgggctcaggccaccctcccaagtagctaaaactataggcatgcatcaccacatcatttcattgaagtatttattaggtaccatcatgagctaggtgcagttctaggtattgagttttatcagtaaataaacatgatcatcacagaggatgtgaaggaagcatttaataaattcaagaggaattcagcctcataaactatgaaatattgggaaataattcatcatgtaaaaactggatataaagaaaaaacttttcctgcaggacattgttgcaggaagtcagggaccccaaacggggggactggctgaagccatggcagaaaaacatggattgtgaaggtttcatggacatttattagttccccaaattaatacttttataatttcttatgcctgtctttactgcaatctctaaacataaattgtaaagatttcatggacacttatcacttccccagtcaatacccttgtgatttcctatgcctgtctttactttaatctctcaatcctgtcagctgaggaggatgtatattacctcaggaccctgtaataattgcattaactgcacaaattatacagcatgtgtgtttgagcaatatgaaatctgggcaccttgaaaaaagaacaggataacagcaatgtttaggaaacaagagagataaccttaaattctgaccgccggtgagccaggtggaacaaagccacatttctcttctttcacaagcaaatgggagaaatatcactgaattctttttctcagcaaggaacatccttgagaaagagaatgcacacctgggagtgggtctctgaactggcccccctgggtgtagccatctcttatggtcgagactgcaggggtgaaatagaccccagtctcccatagcactcccaggcttattaggaagaggaaattcccacctaataaattttagtcagaccagttgatctcaaaaccgtctcctgataagatgttatcaatgacaatggtgcccaaaacttcattagcaattttaatttcaccttggtcctgtgatctcgccctgcctccacttgccttgtgatattctattaccttgtaaagtacttgatgtctgtgacccacacctatttgcacactccctccccttttgaaaatccctaataaaaacttgctggtttttgcggcttgtggggcatcacggaacctaccgacatgtgatgtctgccccggacacccagctttaaaatttctctcttttgtactctgtccctttatttctcaagttggctgacacttagggaaaatagaaaagaacctatgtgaatatcggggctggttccctgacaggacataacctcttcaaaaaataaaaaagaaataaaagcctacagccaaaccaacaaaatagagtgcatatctcaccagaactgcaaagacaagtatgctggtattactacttttagttggtgttgtgcagcgggttaaaatcagtccagtaaagcaagaaaatatttagagagagcttcatcatcatacgaattttgggggtcattgttcagtccaaagtacttaatatgattcttttctctttccacatagagaatcagataatctataaataatgactcttactgttccactttaggagttaggtatacatacatatgtgtatatatatgtatatatatatacacatacacacacacacacacacacacacagtgaccccccaaatttcatatgaagttccaaacctcaatgtgactgtatgtgaaaagagaagggggcggggaggggggagaccgaccgacctatttgttggtctccatcgtgtgaaaacatgaggaagtgggcacttacatgccaggaagagagctctcactagaggttgaccatgctggcactctgatctcagacttccagcctccagatatgtgagaatataaatttgtgttttgggccagatacggtggctcaggcctgtaatcccagcactttgggaggccaaggcaggtggatcaccaaaggtcagatctgaccaacatggagatcagcctaaccaacatggagaaaccctgtctctactaaaaatacaaacttagctaaggtttgtggtgcatgccaataatcccagctactgagggtgaggcaggagaatcactggaactcaggaggtggaggttgcggtgagccaagatcataccattgcactccagcctgggcaacaagagcaaaactccatctcaaaaaaaaaaaaaaaaaaaaaaaaaaaatcctgtgtttttaacctcattgatttaaaattaaattaatttctaagccatttggtctgcggtattctcttatggttgtctgagctgactaaggcagatattggtactgagaagtgaggtactgcaattaaaaacaaacaaaaaaactaaaaatgtgaagcagctttgaaactgacaaatgagtagaggctggaaaaattctgatgtgcaagctggaaataaggttggtaagggttattctggtgaggtgtcattggggaatgaggaacatgctattgggaaatgaagaaaagacaacccttgatataaagtggtgaagaacttggcagaactgtattctagcattttacggaaggtagagcttgagacagataaaatggtatgtatcactaagatctgtaattaaagtgttaaaggacacaggaagcttcattattcctgagtgcttacaggaaaatgtgctgggaacaggccccccaaatctggccataaacaggcaatgagaaactggccataaacaaaatctctgcagcactgtgacatgctcgtgatggctatgacgcccatgctggaggctgctggtttaccagaatgagggcaagcaacacctggcccacccagggcagaaaactggaaaactgctcaaggcattcctaaaccacaaacaatagcatgagtgatttgtgccttaaggacatattcctgttgcagataacaagccagagcctgtccctttctttctcataaggaatacttatagctgatctacaatctataggaataatgtttatcacaggcttactgtcaataaatatgtgggtcaaactctgttcaagctcagctctgaaggctgtgagccccgattcccactctgcactatatttctgtgtctttgtcttaattcctctagagccactgggttagggtctccacgacccagctggtctcggcaaaaatgcaaaaggagacctgaattgcagaagaaattgttaaggaaaaaggaaccagaacttggagatttggaaaattctcagcctatccatactgcaaaaattagaaaacttgtactgaagagaatcctcaaagtgtggctgaacaatcatttgataaagagatcatgagtgggattcatggactatatcagccatcttaacagaagtgagaagagagactggattatactataagagacactgccacttacattgtgccacctaaaatggacagagaagacagaacagaacagtcaaggttgtcacacttcttattttacaagaaggggacatagaaataatcagctgtgaaagggcactggcagttatggatggtttcactcctgacatgctctgcaggatccatgggaacagaagagaaccttggaggagcatctttttaacaatccacctctggggcctacatcatcttggcttctggtaaattttgacatgaatgtgccacactggcagccactaaccaacaggggctgggatcaatctgcatgatttatctcgtacagaacttgttaatgctatgatcttaggaatctaatcaccaaggtgaggcagcctgcagtactgacctcaccatccatgacccttcttcacagatgcccagactcaggtaaccatgatgttgtattcagaacctgtaggtttaatttcagaccctcgggatgcatctaaggccaatctgtgagccattacaacctccaaaaggcatttaggactaatctgatgatctttgcactgccaataattaaagatggcaaccaatgggctaaatggtaacaacactcatatccttacattcatagtatttctccccagtgtgaattctttcatgcatacttaggcatgaggaaagagcaaatgctttcccaaattctttacatacaaaaggtttctctctggtaggagttcacaggtggggtgaggaatacagaaattctttcccacatatcttgcatttacctttctccactgtgagttttcaaatgtttactacgatgggaagaagtaatgaaggtcttcccacattcaacacattcataaggcttctctcctgtgtgaattcttctatgttgagtaagcgttgaagatctattgaaggctttcccacattccttacactgatagggtttctctccagtgtgatttcgtatgtgtatagcaaggcccgtgtactgagtgaaggcttggccacattccttacattcatagggttttattccagtgtgagttcttacatgttgagtaaggtgagttgatctagtgaaggctttcccacattccgtacatttgtgtggttttattccagtgtgaatttgaatgtgaacattaaaggatgaggaatttctaaaggatcttccacattctttacattcaaaggacttctctcctttatgagtttttgcatgtgcagaaagttgagaaaaattagtgaaggatttcccacagttcttagtcttttcggatttctttccagtatgaactgctacacactgctttaagtgtgaggaagttgtgatggctctctcacattcctgaaattcacagagtttctctccaatgtggattcccatgtgattatcaaggcttgcaaaatacttaaagccttttccacattccttacatttgtagggttgtcttccattgagaatttcaagatgcacagcaaggcctggagttaaggtgaagacttttccacatggattaaatttggaaagttcttgtccaatagaggcttccttgtgcacactgatgctgtcttttccataacaattaccctcaaaagtgttccctccattctgagctctcatgtgtgtcttaaggcaaaactgttcactgaagacctctccacaattctcacagagtttccatccactgtagcttcttgtctgctgatgaggggataaaggatttaaaatgttttcagacatattaagagatttcacccatctgaacacagaaacattattttgatgacaattattttactttttaatgtttaattttttttttttttttgagacagagtcttgttctatctcccagtctacagtgcagtggcacaatctctgctaactgcaaccttcacctcccaggctcaagtgattctcctgcctcagcctcccgagtagctggaaatacaggtgtgcactactgcactggggagtttttctactttttttgtagacatgggttttgccaagttgcccaggctggtctcaaactcctgagttcaggtgaactgcctgtcttggcctcccaaagtggtaagattacaggcgtgacccaccatgcacaacatgttttacttttttcagagctggggttttgctccattgcctggtctatagtgcactgcagtgatcatggctcactgtaacctcaaacgcctggctgggttcaagtgatcaccctagctaaaagctgtgtagctaggactagaggcatgcatcatccaattttttgatttatttatttattttattttatttatttttgagatggagtctcactttggctggagtgcagtgtcacgatttcggctcactgcaacctccgcctcctgggttcaagcggttcttctgcctcagcctgccaactagcatgtgcaaccagacccagctaatttttgtatttttcctacagatgggacttcatcatgttagccagggtgttctcaaactcttgaccttctcatccgcctgcctaggcctccgaaagtgctggaattacaggcatgaggcactgcgcccggcctcaatttatttttatagagacagggtcttggtatgtagcctaggctggtctcaaactctacaagaaacccccgtctcagcctcccaaactgctgggattacagccatgagctaccaagtcagcctactttgataaccataatttttacaatatttcttccatggtttcatttcctaccctcttgatctcttgccagaattctatgccactggctctaattgttcaaaaaaaaactgtctttttttgattgttgggggtggtttgagacagggtctcactctgtcacccaggctgggtaccatggcacaatcacagctcactgcagccttaaactcccaggctcaagccatcatcctgcctcagtctcctgaggagcctggattacaggtgcatgccaacgtgcccggctaattttttatttttttgtagagacagagtctccctgttgcccaggctggtcttgatctcctagactcaagcaattctcctgcctcagcttcccaaagtgctgggattgcaggtgtcagccattgcacccagccaaattgtgcagattttcatgaaactttaaatcctcaatgtctagttacatatgtgggaatatgtacttgtcggtatttttcagtgacaagttatacaggtatggaacatcagaaaattcatcacattcagactatctctccagagaccctgctccctcaagggtgcaggctacttctctctcaagtatctctcatttgtgctgtttctttttcatgccaactccacctcccgtgtttaagcaattctgcctcagcctcccatgtaactgggattacaggtgcccaccacacctggctaattttgtatttttagtagagacagagtttcaccatgttggtcaggctggtctcaaagtgctaacctcaagtgatccacacacctccacatcccaaagtgctgggattacaggattcactttcttttctttctttttttttttttttttttttttttttttttttttagatggagtctcacttggtcatctaagctggaatgcagtggtgcagtgctggctcactcagcaacctcggcctctgggtaagcaattgtcctgcctcagccgcccgagtaactaggataacgggtgcccaccaccacacacagctaattttgtatttttagtagagacagagttttcaccatgttggccaggcctgtctcaaactcctgacctcaagtgatccacctatctttgcctcctaaagtgttgggattacaggcatgagccaccacatccagcctctttttaaaatcagagatggtatattgctatactgcctaggctggtcttgaactcctgggctcaaatgatgatcccacctcagcctcctaagtagctgggattacagatgtaaaccacaccactaactgggctgattttttagaatggaattctcaatcttttctgagagaggaaattaagaaatatccctcatggcctgacacagtggctcacgcctgtaatcccagcactttgggaggtcgaggcagatggatcacgaggtcaggagatcaagaccatcctggctaacatagtgaaaccctgtctctactataaatacaataaattagctgggcatggtggtgggtgcctgtagtcctagctactcgggaggctgaggcaagagaatcgcttgaacctgggagttggaggttgcggtgagctgagatggtgccactgcacttcagcctggcagagcaagactccgtctcaaaaaacagaagaaaaaaataagtatccctcatgaatcttaccatttgtatcccagtgaatatttgattcttcaaaaaaccctgctgaagtgatgaccgtttggttctaggttgtatttcccattctgaagttaagcagaaaaagaaatctaagggtttagagaagaaatgtgttagtttaaaattagtcatttgtccttgttttcaaattaaacacagtatgaaaataaaagccacaggccaggcacggtgactcaggcccgtaatcccaggactttgggaggctgaggtgggtggatcacgaggtcaggagatcaagaccatcctgaccaaaatggtgaaaccctctctctagtaaaatacaaaaatatatatatatatatatattagccgggcgcgttggcatgtgcctgtagtcccagctactcaggaggctgaggcaggggaatcacttgaaccccagaggcggtggttgcagtgagctgaaatcacaccactgcactccagcctgggtgacagaacgagactccatctcaaaaaaaaaaaagaaaaaagaaaacaagagaaccttgaggattttggtatgtcaaaaatttggctataaggatgtggggtttattacacaactgatgtgtttagatagtttataacaaactgcttctgtgaaaattacaactgatggggaacaggaagagaaaattatcaggaaaggaaagcaggaaagatcaggataaagagcatatatcaaaatgataaacttaacaaaaaaacagaacagcttcgggaagctgaggcaggagaatggcaagaacccgggaggcagagcttgcagtgagcagagatcctgccactgcaccccagcctgggtgacagagtgagactccctcaaaaaaaaaaaaaccaaaaaaaaccaaaagcaaaacaaacaaacaaaaaaaacagaactggtagttttgtttgactagatggaaagtaaaagtcagagatatctgaaattctgagaaaaacagcttaaatcttctcaggcaaagtggatctttaaaaatcttttttttttttttgagtcaaagtcccactctgtcaccaggctggagtgcagtggcacaatctcggctcactgcaacccctgcctcctgggttcaagcgattctactgcctcagcctcccgagtaactgggactacaggcatgtgccaccatgcctggctaatttttttgcatttttagtagagacagggtttcaccatgttagccaggctggtcttgatttcctgaccttgtgatctgcctgcctcagccttccaaagtgctgggattacaggcgtgaacctccgggaccggcctagtctttattcttaggatttttttttagagatgaggtttcacaatgttgcccatgctagtatcaaactcccaggctccagcgattctcccacctcagcctcccaagtatctgggactacaggtgcaggccaccatgccaagcaaagtgatgttactcttacccacagaggccaggttcatgtagttctccagcatcacatctctgtagaggtatttctgagttgtgtccagtaaagcccactcctctggggtgaactccacagccacatcatcaaacgtcactgaatcctaagtcatcaaacacatgctggtttgagccaatgaacacttccaccaatattcactggagaatgaggaaaggggaaccttatactcacttatacgtggttctcaagtctcccatgatctactccagggtttaatgtctcaggagctcttgtgtctaaacaatcaaggttgacctcctacaggcatatgccttaaacagcactttttttctttctttctttctttttttttgtgacagagttttgctctttttgcccaggctggagtgcaatggcacgatctcggctcactgcaacctccacctcctaagttcaagtgattctcatgcctcagcctcccaagtagatgggattacaggcatgcaacatcacgcctggataatttttgtatttttagtagaaaaggggtttcaccatgttggccaggaaggtctcaaacttctgacctcatgtgatcggcccacctcagcctcccaaggtgctgggattataggtgtgagacaccatgcccatctgaacagtactttttaaaaaaatttttaaatcttttttgtctgatctatttatttttaattttttaattttttttaattttaatttttgattagaacagtacttcctaaacattaatttttatctatctagcatctatctatctatctatccaatctttttatttatttatatataaagacagggtcccactgtgccacccaggcacaatcgctgcttactgcagcttcaatctcctgggctgaagtgctcctcccaccccagcctcctgagtagctggaattacaggcatgagccactgcacactgcttacattatctcagcacaaacaggctaggagctcttcctgtcccattggtctctgggcagcacactcctcagcacactgcagatacctgataaatgctgatgagtgaattaattatttgataaaaggacactttcatctgctttatcatctgtcaccgcacccagcaatgtaagaaagatgcagttggcaccatgaaggtcaagcttaagtagtaattaccgagctactggaatgatcttcaagttaacactttatgtataggagacttcattccctggggaaattcacctggggattcagtccttgagtaaggcttcatttgctctaagaaaactctggagatgagtctgtctagaaggaaatgtgtctacctattggatgtaagtatgtcattttgtacaacggtacattttctgtttacctggtaagaatttgaccggtggtcctctaccatcgttcctatctttgtcttttcttcaaaaggacagattggttccctgggaaaaaaccctagtggaaaagtaagaaggcatgagaagccagagctgcccacattcttatgcccagaagtcattccatcctagcttgaaattcccatatgctcctgcacactcgaaaaaactacacacacacaacacttccatgaaatgccgtagtagtcctgtatcacctagacccagaaaagcagatatgggctgagctgcctgttgtgtaaagggtaacagtttcatttttcaaggaaacttacaccctgaaaaatgtgactatctgcccatagtagtaacactcatgaagcttatgtagcatttccaaaggcacacaaaccagggctgaattctaaaacagcattctgactgggcacagaggctcatgcctgtaatcccaacattttgggaggccaaggtgggcaaatcactcgaggtcaggcattcaagaccagcctggccaacatggcaaaaccccgtctctactaaaaaaaaaaaaaaaaaaaaaaaaaaaaaaaaaaaaaaaaaaaaaaaaactacaggaggctgaggcagagaactgcttgaacctgggaagtggaggttgcaatgagtcaagatcatgcaactgcacttcagcctgggtgacagagtgagactccatctcaaaaaaaaaaaaaaaaaaaaaaaaattagctgaacctggtgatgcatgcttgtgatcccagctacttaagaagctaaggcaagagaattgcttgaacccagcaggcggaggtttcagtgagccaaggttacaccactgcactccagcctgggtgacagagcaagattcggtctcaaaaaataaataaataaaaatatgaataaaataaaagagcattctgcgtcttacttgaattcctccttaaagaactagcagcagccaggcacggtggctcatgcctgtaattccaacactttgggaggccgaggcaggcaaatcacctgaggtcgggagttcaagaccggcctgaccaacatggagaaacccgtctccactaaaaatacaaaattagcctgtggtcccagtgactcgggtgggtgaggcaggagaattgtttgaacccaggaggtggaggttgcggtgagctaagatcatgccattgcacttcagcctgggcaacaagagcaaaactccatctaaaagaaaaaaaaaaaaagcagcatgcctgttcaggcccagctcactggactcttatgttgtggagggcgacctaaagcagaatctctgaaaaagagcatcaacaaggacttaccatgggacatatcaaaggctgacatcctctgaagctgatggtgagatgtgcctcaatgctgtctttcttgatgccaagatcgcctcagggcagcttatgaatctaggtggatacaggcaatctccattcccctttgtacagggttatctgaggccctgttcataccaatcaccaaacaacaagcatcaaacatcagtcattgaacattatgcatgagctttctctctgcaggtgacagatgtgaaggccaccaaaaactgtatactcagtatcgtcactcagtaatgatagtattaataacagcaactgacatttattgaggactagtatgtcagaagtagctctagtagctttatatatacatgctcacttaattatcataaccatccttcccaacagctatcattacctatatgtatctatgtatctatccatctatctatttattgagacagggtctcattctgttgcccaggtttaagtacaatgacacaacaacagctctctgtagcctacatttcccgggctcaagtgatcctcccacctcagcttcctgaatagctgggaccacaggtgtgcatcgtcaagccttattattatattattattattattttgagacagagtctcactctgttgcccaggctgaaatgcagtggcgtgatcttgactcactgcaacctctgcctcccaggttcaagtgattatcaggcctcagcctcccgagtagctgggattacaggtatgcaccaccatgcctggctaatttttatatttttagtaaggatggggttggtcaggcacggtggctcatgcctgtaatcccaacactttgggaggccaaggcaggtggatcacgaggtcaggagttccagaccagcctggccaacatagtgaaaccctgtctctactaaaaatagaaaaaattagctgggtgtggtggtgggcacctggaatcccagctactcaggatgctgaggaaggagaatcgcttgaccccgggaggtggaggttgcagtgagctgagactgtgccatcgcactccagcccaggtgacagtgcgagactccatctcaaacaacaacaacaaaaaagaaatgtgtaaggaaggggtttcatcatattggccaggctggtctcaaacaagtgattctcccacttcagcccccaaagtggctgggactacaggtgcacaccactggatctaattttttgcatttttagtagaaacaaggtttcaccaggttgcccaggctggtctcaaactcctgggctcaaacaatcctcccaccttggcctcccaaagtgctgggataataagcatgagccaccatgcctggcctattacctctattaatactgaaaaaaacctacattcaaataatcctagtaattggtctgatatttgaccctagagcctgatcccctgtatatgctgttaccccccagtatgaccagaagacagcccagacttgcacagaacaactcagtagtcactagccacgtgtgttattgataacttcattgtgtacctaagatgatgaaaaacagaatttaaaatattcaaaagatggccaggcgcggtggctcacacttgtaatctcagtactttgggaggctgaggcaggcagatcacctgaggtcaggagttcaagaccagcctggccatcatggcaaaaccctgtctctactaaaaatacaaaaattagctgggcgtggtggcacacgactactcagaaggctgaggcaggagaattgcttgatcccgggaggcagaggttgcagtgagccgagatcatgccactgcactccagactgggtgacagagcgagactccatctcaaaaaaaaaaaaagagagaaagaaaatatagacaacaggccaggcacagtggctcacgcctgtaatcccagcactttgggagtaccaaggtaggcagaccacaaggtcaggagatcgagaccatcctggctaacacaatgaaaccccgtctctactaaaatacaaaaaattagccagttgtggtgttgggcggctgtagtcccagctacttgggaggctgaggcaggacaatggcgtgaacttgaggtcaggagttcaagatcagcctagcccatatggtgaaacctcatctctactaaaaatacaaaccttagccactcatggatgctgtagtccaacctactcaggaggctaaggcaggagaatcactcgaacccgggaggtgcccacctcagcctcccaaggtgctgggattacagatgtgagccactgcgcctggccagctattgttctaaatgttgttctttactgaaaagaatgaacacaacagttgccacttggtacacaactaatgtagataatggccttatctctatgccaatttgaaaaaacagccagaactggatgggtgcagtggctcacacctgtaatcccagcactttgggaggccgaggcgggtgggtcacgaggtcaggagatcgagaccatccggctaatgcagtgaaacctcgtctctactaaaaatacaaaaaaaaaaaaaattgccaggcatggtggcaggcgcctgtagtcccagatactcaggaggctgaggcaggagaatggcatgaacccaggaggtggagcttgcagtaagtgagattgcgccactgcactccagcctgggtgacagagcgagactccatctcaaaaaaaaaaaaaaaaggaaaaagaaaagaaacagccagaatcactccacaccattgcctccagactgcataaattttccttcctgttcacttccaaaatatagtcttcaagggtcctgacattccaaaaatcatcacactggttgactgtgtagatgggtttttttttgttttgtttttgttttttgagacggagtcttgctcttatcgcccaggctagactgcagtagcacgattgccaccactgtagctattgttcttttttttctttttctttttttttctgagacagagtctcattctgtcgcccaggctggagtgcagtggcgcgatctcggctcactgcagccgccgcctcccaggttcaagcgattttcctgcctcagcctctcaagtagctgggactacaggactccagagtagctgggactccctagttcaagtgattctcctgccacagcctcccaaatagctgggattacaggtgcatgccaccattcccagctattttttttttgtatttttagtagagatggggtttcacaatgacagccaggctggtcttgaactcctgacctcaggtgatctgcctgccttggcctcccaaagtgctgagattacaggtgtgagccaccacacctggtctgtgaatttgttttgttttgttttgttttttaagacagagtttcactcttgttgtccagccaggagtgcaatggcacaatctaggctcactgcaacctccgcctctttggtttaagctattctcctgcctcagcctcccaagtagctgcgattacaggcatacatcaccacacctggctaatttttgtgtttttagtagagactgtgtttctccacgttggtctggatggtctggaactcctgaccacgagtggtccacccgccccagcctccaaaagtgctggaattatagttcacttgttttaacgttccttaaagtttaattttccccaaggaggggctgcacattttgggttggatttgttatcagtacttacaaaaactattatgttatggttaagttgttccaccactggccagtggactgtcttcaagatggctcctttccttttgacaagaccctaacagtcactgattgttttcacacagggcatgtgttccaacattatcttgtacatttcttgcacggtttggcttatggatgtaatcatatatgtgatctgaggacttttgggtttctgccgtttttgaaaagtttctcagggctggatgcagtagctcacacctataatcccagcactttgggaggctgatgcaggtggatcacctgagggcagaagttcgagaccagctgggcatggtggctcatgcctgtaatcccagcactctgggaggccaaggcgggtggatcatgaggtacagcctgggcgacagagtgagactctgtctcaaaaagaaaagaaaagaaaagaaaatatctcaaataccaccgtttatataacacatttctatatatgcacacatgtgctttaaaaaacagctctaggccaggtgtagtggctcatgcctgtaatgccagcactttgggaggccaaggcaggtggctcacctgaggtcaggagtttgagaccagcctggccaacatggtgaaaccctgtctctactgaaaatacaaacattagctgggcatggtggcacacgcctgaagtcccagctactcaggatactgaggttggagaattgcttgaacctgggaggcggaggttgcagtgagccaagatcgtgccactgcactccagcctggggacagagcaagactctgtctaaaaaaaaaaaaaaaaagcagtttctgtggctacaacgaagtgaaaaaaactccaaggagatggtaagagaatcaaatttccatatccacaacacccttctccttaatccagcaccaagaatgtggaaaatttctaccaattcagtttctacactggaaaaaactgagctcaaggtggacaaccaccttctccaccatcctgggttccctggtaaaagatcagtccctccctgtctcaacccacaggaagcatcacaagagcctgaagggagaaataccctgaggacatccagggacaaagaggggaggcaggactaccatccccagccctgggagcagcatactgtaggggtatgctacacaggtcccctgggcagaacacacagccagccttcccacattgctggaatatgccctttaggactccccaattctggatgggcagtattcttgactgtttgctagagcagaggcaaacatgggtttaagattccatctagtgctgaaaaggaggcggtgacctagggaaattttaaagaaaggaaatcattttgggaggccgacacaggtggatggcttgagctcaggagttcaagacctgcctgggaaacatgatgaaaacccatctctactaaaaagtacaaaaagtagccaggtgtgatggcgtgcacctcacctacttaggagactgaggtgggaggattgcttcagcatgggaggtagaggatgcagtaagccataatcacaccactgcactccaggctaggtgacagagagagacctagtctttaaaaaaaaaaaaaaaaatcaaaagaatttaagaggctggttgctatggctcatgcctgtaatcccaacactttgggaggccgaggtgggtggatcttctgaggtcaggagttcaagaccagcctgaccaacatagagaaacactgtctctactaaaaatacaaaattagctagacatggtggtgcatgcctgtaatcccactactcgggaggctgaagcaggagaatcgcttgaatccgggaagcagaggttgtggtgagccgagatcgcactattgcactccagcctgggcaacaagaacaaacctccgtctcaaaaaaaaaaaaaaaaaaattacacaatggaactttgttttggttttggtatgttgacaaaccaaaatctatgggataaaagcagtactaagggagaattttacagcagtaaacacatacatcaaaaaagtagaaaaatttaaaataaacctaatgataccccttaaaatactagaaaagcaaaaacaaaccagattcaaaattagtagaacaaaagaataaagaccagagccaaaataaaattgaaaataaaaaacaatacagaagatcaataaaacataaagttgattacttgaaaagataaacaaaattaaccttcggctagactaagggaaaaaaatgacccaaataaaataaaaaatgaaaaagaaaacagaacagaaaccacagaaatacaaccaatcattagaaactattatgaaaaactatatcccaacaaactgaaaagcctggaagaaatagacaaattcttgggtgcatacaacctaccaagactgaaccatgaagaaatagaaaacctcaacacaacaataacaagatcaaagtgataacaaaatgaatcccatcaaagaaaagcccaggacctgataacttcactgctgaatcctaccaaaaacttaaagaactaataccaatactacttgaactcctcaaacaaaattgaagaggagagaatatttccaaacttagtctacaaggtgagcattattctcatatcaaaaaccagacaagagcacaacaacaacaacaaaactacacgccaatatcactgatgaacatacctgcaaaaattctcaccaaaatattagcaaaccaaattcaacacattaagaaaatcattcatcacaatcaagtgaaattcatcgtagaaatacaaggatggttcaacatatgcaaatcaataaatgtgacgtaccaaattaacagaaccaagaataaaaaccgtatgagatttccacagatgctgaaacaccatttgataaaattcaatatccctttttgacaaaagtccccaacaaactgtgtatagaacgaatatacctcaaaataataaaggccatatatgacacacccacgtccaacatcatactgaacagggaaaaattgaaagtctttcctctgagatcttgaacagaacaaggatgtccacttttaccacttctattcaacataatactataagttctggccagagcaattaggcaagagaaacaaataaagggcatctcaactaaaaaagaagtcaaattagccatgtttgccaatgacatgacctttttctccttagaaacagggtctccctctgttgctcaggctagaatgcagtggtgatcatagctcactgcagccttggtctcctgggctcaagtgatactcctgcctcagcctcccgagtagctagaaccacaggcatgtgtgacaatgctaactttttttttttttagagactgggggcagaggggtcctcaatatattacccaggctgaccttgaactcctgatttcaagtgatcctcttgctttggcctcctaaagtgctgggattacaggcatgagccaccatgctcagctgacataatcatatttagaaaaacctaaagactctaccaaaaacctgttagaactgataaatgaattcagtaaatgttcaggacacaaaatcaacatacaaaaatcagttgcatttatatacgccaacggtgaacaatctgaaaaagaaatcaaggaagtaatcacatttacaatagctgcaaagactataaaatgccagcaccaggcatgatgactcacaattgtaatcccagaattttgggaggctgaggtggaaggattgcttaagcccaacagttcaagaccagcctgggcaacatggcacggctcagtctcaattaaaaaaaagaaattagccaggcatgatggcacacacctgtagtcccagctactcaaaagagactgaggcaggaggattccttgagcccaggagttcaaggctgctgcatgagctacaactgcaccactgtactccagcctgggcaacaaagtgagaccccacctctgaaaaaaagagaaaataaaaagtaaccaaaaatgtgaaggagctatacaaggaaaactataaaacactgatgaaacaaactgtagagaatacagaaaaaaaatggaaagacattccatgctcatggattagaagaatattgttaaaatgacaatactacccaaagcaatttacaattaagagcaaccgttatcaaaatagcaatgacattcatcgcaaaaatagaaaaaaaatcctaaaatttatatgcaacaataaaagacttcaaacagccaaagaaatactgaacaaaaagaacaaagctggaatcatcacactgccttacttcaaaatatactacaaagctatcataaccaaatcagcatggtactgacataaaaaaaacaaacaaacacatagatcaatggaagagaacaaagaacctaaatacaaatctacacatgtacagacagctcattttcaacaaaggcaccaaaagcatacaatgggaaaataacagtcttttcaataaatgctgctgggaaaactggataaccatatgcagaataaaactagatgccatctctcagcataaaaaaaaaaagtcaaaacagattaaagacttacatctaacacctgaaactataaaactagtagaggaagacccttgggaaacaatccagggcattggtctgggtaaagatttcttgggaagatctcaaaagcacaggcaacaagagcaaaaacaaacatatgagattacatcaagctaaaaagcttctccacagcaaaagaaacaatcaacaaagtgaagaaacaatctacagtatgggagaaaatatttacaaactatccacctgggattaataatcagaatatataaggaactcaaacttgataacaaaaaaaatccgataaaaaaatcagcaaaaggtcagaatagatgtttctcaaaaaaaagacatacaaatggccaacaggcatacaaaaaaatgctcaacatcactaatcatcagagaaatacaaatcacacataaccacaatgagatatcatctcacctcatttagagtggcttttataaaaaagacagggaataacaaatgctgatgaggatatggtgaaaagataatccttgtatgcagttggtgggaatataaattagtacagccactgtagagaacaatattcaggtgtggtggctcaggcctttaatcccaaaacttgaggctgcggtgggagatcacttgagcccaggagttccagaccaggctaggcaacacagcaacacctgtctgtacacacatgcacgcacaaaacctgtctgaaactggcaagacctgtctgcatgcacgcgcgcgagcgcgcgcgcgcgcgcgcacacacacacacacacacacacacacacacacacacacacaaccagtcagggacagtagctcatgcctgtaatcccagctctttaggaggccaaggcaggcagatcatttgaggtcaggagtttgagaccagcctggtcaacatggtgaaactctgtctctactgaaaatacaaaaattagctgggcatggtggcgtgcacctgtagtcccagctactccagaggctgaggtaagagaattgcttgaacccaggaggcggacgttgcagtgaaccaagatcgtgccactgcaccccagcctgagtgacagagtgagactctgtctcaaaaaatcaaagaaacaaacaaaaaaacttagccaggtgtattagtggaggcctgtagtcctggctactcaggaagctgaggtgggaggatcacctgagcccaggaagtcaaggctgcagtgagccatgattatgccatggcactctagcctgggtgacacagcaagactatctcaaaaaaaacaaaacaaaacaaaaaaaacagtatgggggtttctcaaaaaattaaaaatagaactaccatatgatctggaatcccattgggtatatatccaaaagaaaggaaatcaatatatttgaaaagatatatatacattcccttgtttaccgcagcactactcataatagccaaaatatggaatcaacctaagtgtctaacaatgaaagaatgaataaagaaaatatggtatatatagacagcagattattattcagccataaagagaatggaattctgtcatttgcagcaactggatagaactggaggtcatcatggaagtgaaataagccaagcacagcagacaaataccccatattctcacatgtgggagctaaaaagtggatctcatgagcatagagtacagattgatggttactagaggccagaagggtaggaaggagacggagataaagagaggttgattaggctgagtgaggtggctcatgcctgtaatcccagcactttaggaggccaaggcgggcagatcaccctgattatgtgagatcaggagttcgagaccaacctgtccaatatggtaaaaccccgtctctactaaaactacaaaaattagccgggtgtggtggtgcaccccttaatcctagctactcgggaggctgaggcaggagaatcacttgaatccgggaggaggcagaggttgcagtgagccaagatcatgccactgcattctagcctgggtgacggtgagactccatctcccaaaaaaaaaaaaaaaagaggttgattcatcggtaaaatatacagttagaagaaataagaactggtattcaatagatcagtagggtgactacacttaatacgcatctatcatacatttcaacacagctaagagaataacgatgttcctacaatatagaaaagataaatatttaaggtgacaggtatgctacttaccctgattatgtgaatgtatcaaattatcacatgtactctgaaaatatgttcatctattatgaatcaaaaaaatttttctggattgtaaaatagggagtgggagattctggggccaccatgtctgtgggtaaagatattcccttgtctggatcatgtaaagacatccctccaagatgtcactccaagttactgcacctaataccacctaccattaacaaggagcaatgagccatgattatgccattgctctccagcctgggtgatccagcaagactttgtctcaaaaaaagaaaaaaaacccagcatggaggtttctcaaaaactaccatccatagacctcttgaattttggaggcaacacatacatttgcatgtactttaacgccccacacagttacctgtaaggattctagtttcaactgtagacaagagcaatttcaggctgcaatgcaagcttcctaagcacttggtccacctgatccagcagacccagtgatactcaacgtgtccatgttaaatggcatgttatttattggaagcctccggcatgcaccaacagaagatgtagagtacagccctctggtattgcagagtcaatccatgccctcttgtgcagattaactgtttttctcttgagaaacaggttgtggtttgccactagcacatgacagagaatgaacaactagtcatgggacatgaagtaactaaggctgaactgagtaatttgagactttctggtccccaaagcatgaagtacatactgtcacccattatcaaacaactgttgtcagcctctcctctggacccaattccaagtttgtaggaaatcgcatgaaataaaggaatatttacacacaccatgagaatccaatcagaaatatctgattgtatgactttctaagagaatgagtgtgactctctgaaagtcaatataatggacagtaataactgttataggcaaaaagacactgaagacactgacaattgcaatgcaaaaatcttgaatggatcttagatccaaaaacacccaagagcatacgttgaatcaatgaggagaattttagttattacggaaagtagacattagatgacattattatttttaatttaagtgaaatactagtattgtggttttagtatgacaatgcctatttttaggaggtgcattacaaagtatttaaaggtcaagcatcacatgtacaatttatgctcaatttacactcaaattgttcactgtaagatttacatgaggagaaagaaataaaatgctaaaaaattaagtaaatctactagactgggtgtgttagatgttcaagttttccttaggatcaaatttttcagaaaaaaatgtaaaaactacacttagtccaaacatgctcttaataaattatacagatactagatattttattacactgatactagaatactattctgattataatagtaaataattctagtgtcagtgtaataaagcctccattctttcttcctggttcctggaggcctctgttttgaagcactgtggggaagtacagacctaagaacttcagatgaagagaatagttgagtattattgcctttcttttttttttttttttttttttagacagtttcgctcttgtcacccaggctggagggcagtggcgggatctcggctcaatgcaacctccgcctcccgggttaaagtgattctcttgcctcagcctccggagtagctgtgtaagatacaatatatttctctgaatttctcttcaaaagttcagcctgtaaacttccttgttctttgttctcaaactcaactttcctgttctccatgcctccttgcctctagttactgtaaacaaccttcccatcagctctaatcaataactcacatctgttcccttggctactcattctgcagctattccactctttgaaactgcacatcccaccatcatgactcacacatccccctacccttccttatttggggaaaatattcacagatagccaatagggtcagtttagattctgcggtctgaccctaacccacgggggagagacacagaagtagggacccagcgttagaaataaaaaccccttcccctcccttatctggtgtactctcgccatcactccatccacgagactcacccttctatagaaataaattgcgttgctgagaaaacttttgcctgagtgctggtttcactttgcagcacccagcgttttatttttttatctccaacagctgggattacaggggcccaccaccaagcccggctaatttttgtatttttagtagagacagggttttaccatgttggctaggctagtctggatctcctgacctcaggtgatccgcctgcctctgcctcccaaagtgctgtgattacaggtgtgagccagtgcatctggcctggctttaagtagaaaggcttgcagctggtaacaattagaaaaaaaataacctgcaagaaaataaaaattaaaaactaaaggcttagtctacacgcgttcatatttacatacaaaaacgggcacaccctaaacaactatgttttttccatctgaatgtaatgtgtcaaaaataagtggcgggtggatcacttgaggtcaggagttcgagaccagcctggccaacatggtgaaaccccatctctaccaaaaatataaaaaattagccaggtgtggtggtgcacgcctggaatcccagctactcgggaggctgaggcaggtgaatcatgttataaagttttcatgccacaaaaaaaaagcactcaaatataacattttcttttctcagcaaggcaatttacttctacagaagggtgtgccctcacagatggagcaatggtgagcacacaccaggacaagggaggggaaggggttcttattcttgaggaaagtggcccctgccgctttgtccttccccgatggctagggttagaccccacaggctaaactaattccaattggctaatttaaagagagtgacagggtgagtggtttgttggggaaaatggttataacagagcaggaaattggaatgagtcagggtggaaaatgagtcagggtggagtaagtaatcgaaataagtctgggtggagcaggtaatcagaatgagtcagggtggagcaggtgatcgaaaaaggttgctttacggagaagtttaaaagtagaaggcaaagaattaaacatactgacatattgattttttaaaaagaaatttaaaactcatatctaacaatcacttgaacccgggaggtgaaagttgcagtgagccaacatcgtgccactgcactccagcgtgggcgacagagtaagactccaaatcaaaaaaaaaaaaaaagtaaaggacatcaagacaacgccagattctcagatgagacattttttagcaaataaatggaagtcacagccctcttgaaaccatttttccgccgttgctcaccaggaacatgccggaagagataggttccagacgcgggagaatgcggggccagagccaacctcaccagaagggcagaaatccttttcctttcggaaagaaaaaaactcccaaaggttgctttccaagcttttcaagagaggagcacagcggatgaaagtactcaagaaaacacccggcggaggcggaacaaacacacttcccgacgcagccagacggactgtgcggcctctcggaactggccagaggccgcaccaggaggactgacagcccctagaaaagcgagtgaaactaggcggatctgagaggctcctgggcgaccacgcccaatccttcctttgccgccccgctggtatgtcccggacccccaagcaggtagaactcaccacagcggggtggactccaccacaataaaggttaaacggcactgaccatgctgagccacagccggtaaagatggcggtggcacactgacgtcacttccgctccgagcctccggccgggtggggctccagggcttgagtttcaggcacgtaggacaaagaaattctagtttcctcctgggtgggtgccggacagtgcctggggttggctcagggagcgggatgcagaaacgggttcagagaaaaagatgagtttagaaccggacctctggacggaaccgtgggcgaggggtggggcccatatttgggggcggtttagaggtgggacccggcctagcccgcgtttcaggtgcccagacgggttggaaaggcggggatgggggatgggacgcaccccagaggatgctcctccaaagcttatcctgggcgggctcagtggctcacgcctgtaattccagcactttgggaggctaaggcaggtggatagcttgagtccaagagttccagaccagcctgagtgaaatagcaagaccgtgtgtctttttttttcttttctttttttttttttttttttttttgagacagagtttcactcttgttgcccaggcctgtgcccggctcgaccctgtctctattaaaatatatatataaggccaagcgccagtggttcacgcctgtaatccctgcactttgggaagccaaggcgggcggatcacctgaggtcgggagtttgacaccagcctggccaacatgctgaaaccccgtctctactaaaaatacaaaaaaatagctgggtgtggtggcaggcgcttgtaatcccagctactcaggaggctgaggcaggagaatcgcttgaacccgggaggcggaggttgcggtgagccgaggttgcgccactgcactccaatctgggggacaagagcgtgacttcatctcaaaaagaaaaaatatatatatatgtgtgtgtgtgtgtgtgtgtgtgtgtgtgtgtgtgtgtgtcaagcttttttgtatgccgctcctcatgttcctggagcctttccatgattcttccatattaaacctgccagtgatagatggcatggtctgtctcttccattcagtcattctttctgtaggcctttattttttctttttctttttcttttttttttttttttgagacggagtctctctctgtcccccaggctggagtgcagtggtgcaatctcggctcactgcaagctccgcctcctgggttcacaccattctcctgcctagcctcctaagtagctgggactacaggcgcccgcgaccacaaccagctaatttttttgtattcttagtagagacggggtttcacggtgttagccaagatgatccccatctcctgacctcatgatccacccgcctcggcctcccaaagtgctgggattacaggcgtgagccaccgcgcccagcctattttttcattctttattttatagaacctgctgtttccattgcgttttctttttacttttttttttttttttttttttttttgagactggagtctcactctgttgcccgggctggagtgcagtggtgcaatctcagctcactgcaacctccgtctcctgggtgcaagtgattctcctgcttcagcctcctgagtagctgggattacaggtggctgccactatgcccagctattttttctattttcagtacagagggcatttcaccatgttggccaggctggtctcaaactcctgacctcgtgatttgcccatctcagccttgcagaatgctgggattataggtgaagggggccagcccctccacacctgtgggtatttctcatcaggtgggatgagagactgagaaaagaaataagacacagagacaaagtatagagaaagaacagtgggcccaggggaccggcgctcagcgtccagaggacccacactggcaccagtctctgagttccttcagtatttattgattactattttcactatctcagcaaggggaatgcagcaggagaacagggtgatagtggggagaaggtcagcaagaaaacatatgagcaaagaatctgtgtcacagataagttcaagggaaggtactatgcctggatgtgcacgtaggccagatttatgcttctctccacccaaacatctcagtgtagtaaagaatagcagagcagcattgccaccagcatgtctcacctccagccacagggcagtgttctcctgtctcagaagagaacaatgtacattcgggatttataccaagacattccgttcccaggggcattcaggagacagaggccttcctcttttactaatgctcctcagcacagacccttcatgggtgtcaggctgggggacggtcaggtctttcccatcccatgaggccatatctcaggctgtctcagtggggagaaactttggacaatacccagctttcctgggcagaggtccctgctgctttctgcagtgcatcgtgcccctggttaattgagaatggagaatggtgatgactttcatccagcatactgcctgtaaacatattgttaagaaggcacatcctgcacagccctagatcccttaaaccttgattccatacaacacgttttgtgagcacaaggttggggctaaagttacagattaacagcgtctcaaggcaaaacaattgtttagggtacagatcaaaatggagtttcttatgtcttccttttctacatagacaaagtaacagtctgatctctttcttttccctacaataggcatgagcaaccacgcacagccacattttcaatataataatactttctataaatcttgattttttttttcttcaccaagtatgtatttctggctgggcacgttgcctcatgcctgtaatctcagcacactttgagaggccaatatgggaggatcgtttgaggccaggagttggagacaagcctgggcaacacagcaagaccctgtctccttaaaaaacaataaaatttttaaaaaattccttttttcttttattttttgcgatggagtctcgctctgttgcccaggctggagtgcattggcacaatcttggctcactgcaacctctgctccctggttcaagcgattcttctgtctcagcctcccaagtacctgggactacaggcctgcgccaccatgtccagctaatttttgtatttttagtagagacgtttcaccatattggcttggctggtcttgaactcctgacctcatgatccacccactttggccttccaacgtgctgggattacaggtgtgagccactaagcctgaccaaaaatatgtatttctattgttatttttctgatcttaccacatgggccaggaccgcatttcctatgttgtaaaatagcagtaataccagacattctccccaagtttattcagaaatgtaacataatcccaataaaaacaccaaaattttttctggagttaggtacattgatgctaaaagtttatatggaaaaagaaaatctgataataagcaagaaaacaaaaacaaggccgggcactgtggctcatgcctgttatcccagcactttgggaggctgagacaggcagatcacaaggtcaggagatcaagaccatcctggccaacatggtgaaaccgtgtctctactaaaaatgcaaaaattagctgggcatggtggcacgtgcttgtagtcccaactacttgggaggctgaggcaggagaattgcttgaacacgggaggcggaggttgcagtgagctgagatcgcaccattgcaccccagcctgggacagagggagactgtgtcaaaaaaaaaaaaaggaaaacaaaaacaaaagcaatgatgagcagcagatattaaaacatactattgacaattttcacgcaagacaaagaattattttaaaataaaaataagaaaacattctataaagcctctataattaaaactatgtggtactagtgcatgaagcagaaacagactaataaaatatctataaatagacccaagaacatgtagaaatttggttcataaatgtggtattttgctgggcgtggtggctcatgcctgtaatcctagcactttggtaggtcaaggcaggaggatcacttgagttcaggagttggaaaccagcctggccaacatggtgaaactccgtctctactaaaaatacaaaaaataggctcggctggtggctcacgcctgtaatcccagtactttgagaggccgaggtgggtgaatcacctgaggtcgggagttcaagaccagcctaaccaacatggagaaacccccatctctactaaaaatacaaaaatagctgggtgtcctccctctccctctccctctccccacggtctccctctcccgctctttccatggtctccctctgatgccgagccgaagctggactgtactgctgctatctcggctcactgcaacctccctgcctgattctcctgcctcagcctgccgagtgcctgtgattgcaggcgcgcgccgccacgcctgactggttttcatatttttttggtggagacggggtttcgctgtgttggccaggctggtctccagctcctaaccgtgagtgatccgccagcctcggcctcccgaggtgccgggattgcagacggagcctcgttcactcagtgctcaatggtgcccaggctggagtgcagtggcgtgatctcagctcgctacaacctccacctcccagcagcctgccttggcctcccaaagtgccgagagtgcagcctctgcccggccgccaccccgtctgggaagtgaggagcgtctttgcctggccgcccatcatctgggatgtgaggagcccctctgcctggctgcccagtctggaaagtgaggagcatctctgcccggccgccatcccatctaggaagtgaggagcgcctcttcctggccgccatcccatctaggaagtgaggagcatctctgcccggccgcccatcgtctgagatgtggggagcgcctctgccccgccgccccatctggaatgtgaggagcgcctctgcccagccgcgaccccgtctgggaggtgaggagcgtttctgcccggccgccccatctgagaagtgaggagaccctctgcctggcaaccgccccgtctgagaagtgaggagcccctccgcccggcagccgccccgtctgagaagtgaggaaaccctccgcccggcagccaccccgtctgggaagtgaggagcatctccacccggcagccaccccgtccgggagggaggtgggggtgtcagcgccccccgcccggccagccgccccgtccgggagggaggtgggggggtcagccccccacccggccagccgccccatccgggaggtgaggggagcctctgcccggccgccccttctgggaagtgaggagcccctctgcccggccaccaccccgtctgggaggtgtacccaacagctcattgagaacgggccatgatgacaatggcggttttgtggaatagaaaggggggaaaggtggggaaaagattgagaaatcggatggttgccgtgcctgtgtagaaagaagtagacatgtgagacttttcattttgttctgtactaagaaaaattcttctgccttgggatcctgttgatctgtgaccttacccccaaccctgtgctctctgaaacatgtgctatgtccactcagggttaaatggattaagggcggtgcaagatatgctttgttaaacagatgcttgaaggcagcatgctcgttaagagtcatcaccactccctaatctcaagtacccagggacacaaacactgcggaaggccgcagggtcctctgcctaggaaaaccagagacctttgttcacttgtttatctgctgaccttccctctactattgtcctatgaccctgccaaatccccctctgcgagaaacacccaagaatgatcaattaaaaaaaaaaaatagccaggtgtggtggcaggtgcctgtaatcccagctactcgggaggctgaggcaggagaatcgcttcaacccaggaagcagaggttgcagtgagccgagatcgtgccaatgcactctagcttgggcaataaaagcaaaactccatgtcaaaaaaaaaaaaaaagtggtgtttcagatcgatagggaaaaaatgccatttgtaatggaaagtctaagacagttggttagctatcagagaaaagatgaaattaaatctatacttcatatcatatacaatatactccaaatggactagtaatctaagtgtgaaaaataaaaccatacacgcatgtaaggtgttcaagtgatttcttggctgagtaaggaaaaagatgtaactacaaggcggcaatagcatacaagcttcatttgggatgtgctttcacaggttagcagttgcggaggtaggaaacagcaagagagtatccacaggcttctacctgtgggtcacttctcagaaagcgtggaaaggaagagagactcccagaggagaaagggaatcaaagagggggcttataaataactaaatgatgatactcaccaaactgacagcatatcttccagttaaaaagctctgaagggccgggcaagaaggctcatgcctataatcccagcactttgggaggccagtggggcggatcacgaggacaggtgttcaagaccagcctgaccaacatggtgaaaccccatctctactaaaaatacaaaaattagccgggcgtggtggcgtgcacctgtaatcccagctactcaggaggctgaggcaggagaaacactcgaagccgggaggtggaagttgcagtgagccgagatcttgccactgcactccagtctggacaacagagtgagactccatctcaaaagaaaaaaaaaaaaaaaggttctgcaggacagcagggggatgggattttcatagcctctggagttatcttatctatggctatcagatattgcacataatttcagagaatacaaagaaggcacactcgagatggctaaaaataggcttgttcatgctatgtttcaaacaatcaagtgtgttaaaattgcagtttggcagggattggctattgtgaatactagtgagataaacattggtgtacaaatatttctttgagcacctgctctcaacacttttggatatatatgccaaagtggaatgtctggatcatatggtaattctgtttaatcttgtttgtttgtttgagatagggtctcactctgttgtctaggctggaatgcagtgacatgatcatggattactgcagtcctcaacctactgagctcaggtaatcatcccaccttagcctctcgagtagcagggattacaagtgcatgccaccaccatgcctggctgaattaaaaaatcttttttgtaaaaatgaaatctcacaatatgcccaggctggtcttgaactcttagtctcaagaaatccctcaccctgagcctcccaaagtgctgggattacaggtgtgagccatcacatccagcatggttttgattttcattttcatgatgtttagtgatgttaagcatcttttcatgagcatcttttcctgtgtttattggccatctgtgtatcttctttggtgatattattcaagtcctttttctgtatttgaattgggttttgttgttgttactctcgggttctagaaattttaaaaataaactccagatatttgtccccagtcggatacaggacttgaaaatattttctcccatttgtagattgtcttttcattctcttgttattatgctttgatgcaaaaaatttgtattattgattaggttcaactcataatttttcttgtgttgcctgtgtggttgatgacataactaagaagtcatttccaattccaatatcatgaagctttctcacctatgttttcttctaataggttttcagctctagctcttacactacacttaggtttttgatccattttttaaaaatcatgccacattattattattattaagatggaggcttgctgtctcccaggctggagtgcagtggtgcgatctcagctcactgcaacctctacctcccaggttcaagtgattctcctgccattgcttcctgagtagctgggattacaggtgcatgccaccatgcccggctactttttgtatttctttttagtaaagacagggcttcaccatgttggtcaagctgatctcgaacacctgacctcgtgatccacccacctcggccttccaaagtgctgggattagaggcgtgagccactgtgcccggccatgccacattatttttaattatgtacaaagatctaaaatgtcactcagggaccatttcatccaccactctgtttggccaccagtcttttgtctgtctcttctgcaatagtgaggcggataccctttcctcggggaagagaaatccatggtctgttgcccttgccaataacaaaaatgttggaaaatctagtggcaaatctgttgcctttggcatccttcacgtaaaccactttgaaagatcgagggtgccgctctctgttgatcacaccaattcttcccaggttagcacttccagtcaccatacacaggttccagtgtcaatcttgatgaaatcagtaatcttgccagtctctaaatcaatctgaatggtatcattcaccttgataaggggatcagggtagcagatggcgtgagtatcaagagtcaccagatgagggattccttttgtgcccacaaagatttttctcagtttgcataacatgtacttggcctcctcaggtgtaatacgttgtacagcaaagtgacccttggtgtcacaggtcagttgggaattctctcccatcttgtcagtgttgatgacatccattaatccagcagggtaggttatatcagttcggaccttgccatcgatcttaaccgctgtgggaaaatctttacttcaactcctgtcagggcatacttaagtctcttccttaggaaaatgatgaggggtaaacactctctcaacttgtggggactggtggatggatgaggagaaacacaccagtcaatttatccaacattcaatactttggagctgctatccccttcagatgcttcttgggaccacgagccatggctgtgttaggcaaggaaagagttaatgatttttcatctttttttttttttttttttgagacggagtttcgctcttgttgcccaggctggagtgcaatggcgtgatcccagctcactgcaacctctgcctccccggttcaagcaattcttctgcctcagcctcccaagtagctgagattacaggtgcccaccaccacacccggctaatttttgtatttttagtagaggcggggtctcaccgtattggccaggctggtctcaaactcctgaccttgtgattcccctgcctcagtctctcaaagtgctgggattacaggtgtgaaccaccgtgcctggccttgatccattttaagttcattttatatatggtataaggttagggtctaactcccttcttatgcatgtctatatccagtttttctgctaacacttctcccccacctcccaccacaagctttattgatacctcattgacaaagaaaaactgtatatacttaaagtgtgcaatgtgatgtttagtataaacattgtgaaatgattaccactaccatactaatttatgtatccatcacttcacagtcaccttttttactgtgtcgagaacacttaaaatctgctgtcttagtaaactccaagtatacaatacagttttttgttttttgttcttttattttttttgagtcggagtctttctctctcaccaggctggagtgcagtggtgtgatcttggtttactgcaacttctgcctcccagattcaagcgattctccttcctcagcctcccaagtagctgtgattacaggtgcacaccaccatgctgggctaattttttgtatttttagtagagacggggtttcaccatgttggccaggaaggtcttgatctcttgacctcttgatccccccacctctgcttcccaaagtgctgggattacaggcgtgagccaccacacccagctggacaatacagtattgttaactaaaatctccatgctgtacattaaattcctgaatttcttcatcttgtaattgaaagtttataccctttgactaatgtctctccagtctctccccattctcccagtccctggcaaccaaaattctccacttttttttttcttcagatggagtatcactctgtgcccaggctggagtgcagtggcaggatcttggctcactgcagcctccgcctcctggcttcaaaggattcttgtgcctcagcctcctgagtacctgggattacaggcgcccacgaccacgcccggctaatttttgtatttttagaagagatggagctttaccatgttggccaggctggtctcgaactcctgacctcgtgatccacctacctcagcctcccaaagtgctgggattacaggcgtgagccaccgcgcccagccagcattctcctctttgcttctgtgagtcaaggactatgtggctatgttacagcccacatatatgtgagattatacaagatttccttctctttttaaggctaaataatattcacatatataatcacattttcttcatttctaaatgtccaggaacatttaggttgtttccatacttgtctattatgaagaaggctgcaatgaacgtgggaatgcagatatctcttcaagatattcacgtcatttcctatggaaatatacacagtagtgggattcctggatcatgatggtattgttaatggaaaggcgtctggatccagaccccaagagagggttcttggatcttacacaagaaagaatttggggagttcataaagtgaaagcaagtttattagagaagtaaagaaacaaaagaatggctactccataggcagagcagtggtatgcactgctctattgagtatacttatggttatttattgattatatgctaaataaggggtgggttgtcaataagtttttcaggaaaggggcagagattttctggaacctagcatccctctttttttttttttttttgagacggagtctcgctctgtcgcccaggctggagtgcagtggcgcgatctctgctcactgcaagctccgcctcctggattcacgccattctcctgcctcagcctcgtgagtagctggaactacaggtgccggccaccacacccagctaattttttgtatttttagtggagacggggtttcaccgtgttagcctggatggtctcgatctcctgaccttgtgatccatctgccttggcctcccacagtgctgggattacaggcgtgagtcaccgcgcccggcctacatccctccctttttagactatataggtaaacttccaaacatggccatgacatttgtaaaaagtcatggagctggcggaagtgactttttagcatgctactgcattataattaacctataatgagcagtgaggatgaccagaggtcacttttgtcaccatcttggatttggtgggatttggctgggttctttaccgcatcttgttttatcagcaagctctttatgacctgtatcttatgccgacctcctatctcttcctgcgactaagaatgcctaacctcctggaaatgcagcccagcaagaaaaaaagaaaaaagactgccttttctccattgaaggttcttggcaccatggtcaaaagccatttgattatatctgtgaaggtttatttctggtctctttatgctataacaatggtctccatgtctagttatgcctataccacattgttttgattactatagctttgtagtaccattttttctgctttttttcttgagacaggttcttgctctgttgtccaggctggagtgcaatggtgtgatcacagctcactgcagggtcgacttcctgggctcaagagatccctcctatctcagctcctgagtagctgggactacaggcatgcaccaccatgccaagctattttttatttttattttttgtagagatgaagtctccttaagttccccaagctggtctcaaactcccgggctcaagcagttttcctgactcagcctcctgaattgttggtattacaggctagtaacttttgacatcacaaagtctgaattttccaacaatccttttttttttttttttttttttttgagactaagtctcgctctgttgcccagactggagggcaatagcatgatctcagctcaccactggctaatttttgtgtttttagtagagacagggtttcaccatattggccaggctggtctcgaacttctgacgtcaaatgatctgcctgccttagcttcccagagtgctgggattacaggcttgagccaccttgccctacccaacaaacttctttttcaagattgctttcactgtgtggactccagtgagattccatatgtgtgtggtcttttgtaacccaaacttcagcagtgacttaacatgatttttgccacattctgctagtcacagagacgaagcctgctacaatgtgagaggactacacaaaggtatgagtattgagaagcagagattattgggggacaatttggaggctggatactacagagaaggaattggcaatacccaaaaacactacctgtgcaatctggaaaccgttttcttttttttttttttttaattttgaggcagagtatccctctgttgcccaggctggagtgcagtggcacgatctcaactcactgcaacctccatttcctgggttcaagtgattcttgtgcctatctccctagtaactgggactacaggaatacaccaccacacttggctaattttttttaatttttagtaaagacagggtttggccatgttgcccagcctggtctcaaacttctgagctcaggcaatccacccccttgccctcccaaagtgttgtgattacaagtgtgagccaccgtgcacggactttttcttttccctttttttttttttttttttttgagagagttttgctgtgtcccccaggctggaatgtgcagtggtgcaatctgggctacctgcagcctccacctcccaggttcacgcgatgctcccacctcaacctccagagtagctggggactacaggcatgagccaccacacccagctaatttttgtatattttttagagatgggctcaccattttactcaggctggtctcgaactaaggagctcaaagtgctggggttacaggcatgggcaactgtgcctggccttgcaatcctactttttttttttttttgagatggagtttcactgttgttgcccaggctggagtgcaatggcatgatcttggctcatcccaacctccacttcctgggttcaagtgattctcctgcctcagcctcctgagtagctgggattacaggtgtgtcaccacaccctgctaattttttgtatttttagtagagacggggtttcaccatgttggtcatgctgttctcgaacccctgacctcaagtgatctacccacctcggcctcccaaagtattgggattacaggcatgagccaccgtgcccagccacaatgctacttttaagaatttttttttatactaagtccaggattcagtctaaacttctaagaatttgccttaaaggtaaacctttaacaattcaaataagttcaacagtattaattgcagcactgtttgtaatttcaatttgaatgcctaaatgctctcaagtattagagtatctgaatatatggtacatcaaccagtggagtatcctgcagctctagaaatgaatgaagatctctatgaactcacattaagtgatttccaagatacatggttaactaaaaacacaaactccatctcaaaaaataaaattttgtgtttttaacctcatttatttaaaattaaatgaatttgtaagccatttgttctgtggtattctgttatggttgcctgagctgattaaggcagattttggcactgagaagtgaggcactggaattaaaaacaaacaaacaaataaaaaaactaaaaatgtgaagcagctttgaaactgacaaatgagtagaggctggaaaaattctgatttgcaagctggaaataatagtaagggtgattctggtgaggtgtcattggggaatgaggaacatgctattgggaaatgaagaaaagacaaccctttatatgaagtggtgaagaacttagcaaaactgtattctagcattttgtggaaggtagagcttgagagagataaaactgggtatgtatcactaagatctgtaattaaagtgttaaaggacacaggaagcttcattcttcctgactgcttatagtaaaatgcaaaagaggagacctgaattgcagaagaaattgttaaagaaaaaggaaccagaacctggagatttggaaaattctcagcctatccataatgcaaaaattagaaaacttgtactgaagagaatcctgaaagtgtggctgaacaatcatttgacaaagagatcatgagtgggattcatggactatatcagccatcttaacagacgtgagcacaaagactggattatactagaagagacacttccacttaggttgtgccacctaaaatggacagagaagacagaacaggtaaggctgtcacatatcatagattttacaagaaggggacacagaaataatcagctgtgaaagtgcactggcagttaaggatggtttcatacctgccatgctctgcaggatccgtgggaacagaagagacccttagaggagcatcttttaacaacccacctctggggcctacatcatcttggcttctgggaaattttgacatgaatgtgccacactggcagctactaacaggggctgggaccaatctagatgacttatctcatacagaaattcttaatgctatgatcttagaaacctaatcaccaaggtaaggtagcctgcagtactgacctcaccatccattacccttcttcacagatgcccagactcaggcaaccatgatgttgtattcagaacctgtaggtttaatttcagacccttgtgatggcacccaaggccaattcatgagccattacaacctccaaaaggcatttaggacaaatctgaatatctttagtgtcactgccactaattaaagatggcaaccaatgagctaaatggtaacattcatacccttatattcatagggttcctccccagtgtgaattctttcatgtctacttaggtgtgaggaaacagcaaaagctttcccacattctttacatatgagggctttctctctggtatgagtttgcaggtgaacattaaggggtgaggaatatagaaatgctttcccacatatcttgcatacaaagggcctttcttcatggtgagttttcaaatgtttactacgataggaagaagtaatgaaggtcttcccacattcaacacatccataaggcttctctcctgtgtgaattattttatgttgagtaagggttgaggatccattgaaggctttcccacattccttacactgatagtgtttctctccagtgtgatttcgtatgtgtatagcaaggcccgtgtactgagtgaaggcttggccacattccttacattcatagggttttattccagtgtgagttcttacatgttgagtaaggtgagttgacctagtgaaggctttcccacattccgtatatttgtgtggttttattccagtgtgaatttgaatgtgaacattaaaggatgaggaatttctaaaggatcttccacattctttacattcaaaggacttctctcctttatgaattttcacatgtgcagaaagttgagaaaaattagtgaaggatttcccatgtttcttagtctttttagatttctttccagtatgaactgttacacactgctttaggtgtgaggaatgagtgatggctctcctacattcctgaaattcacagaatttctctccaatgtggattcccatgtgattatcaaggcttgcaaaatacttaaagccttttctacattccttacatttgtatggttgtcttgcattgagaattccaagatgtgcagcaagatctggagttaaggtgaagacttttccacatggattaaatttggaaagttcctgtccaatagaggcttccttgtgcacactgaggatgtcttttccataacaattaccctcaaagatgttccctccattctgagctctcatgtgtgttttaaggcaaaaccattcactgaagacctctccacaattctcagagtttccatccactgtagcttcttgtctgctgatgaagggataaaggatttaaaatgttttcagacatattaagagatttcacccatctgaacacagaaacattattttggtgacaattatcattttactttttaatgtttaatttttttttcatttcctaccctcttgatttcttccagattgaatgatgggatcttttgctagaattttatgccactggctctaattactcaaaaaaaaaacaactgtttttaattgttgggggtggtttgagacagggtctcactctgtcacccaggctggtaccatggcagaatcacagctcactgcggccttaatctcccaggctcaagtcatcatcctgcctcagtgccccaaggagcttcgactacagttgcatggcaacacacccagctaaatttttattttttgtagagacagggtctccctgttgcccaggctggtcttgaactcctagactcaagtggttctcctgcctcagcttcccaagctgctgggattacaggcatcagccattgtacccagcaaaatagtgtagattttcatgaaactgttccaatcctcaatgtctagttacatatgtgggaatatgtacttgtcggtattttgcagtgacaagttatataggtatggaacatcacaaaattcatcacattcagactatctctccagagactttgctccctcaatggtgcaggctacttctctaattctcttaagtatctctcatttgtgctgtttctttttcattgcacactccacctcccaggtttaagcaattctgcctcagcctcccaagtaactgggattacaggtgcccaccaccatgcctggctaattttgtatttttagtagagatagaggctagtctcaaagtgctaacctcaagtgatccacccaccttggcatcccaaagtgctgggattacagactcagtttattttccttctttctttctttcttttttttgtgagatgaggtctcactccatcgcccaggctggaatgaagtggtgcaatcttggctcgctcagtaacctccacctctgggttcaagtgattttcctgccacagcctcccaagtaactggtatgacaggtgcccaccactacacttggttaattttgtatttttagtacagacggagtttcaccatgttggccaggctagttttaaacccctgacctcaagtgaccacctacctcaacctcccatagtgttgggattacaggcatgagccaccacatccagcctctttttaaaatcagagatgggatcttgctatattgtctaggctggtcttaaactactggacttaaatgatcctcctacctcagcctccctagtagctgggattacagaagtaagccatagttctgaccgtgctgatttcctagaatggaattctcaatcttttctgagaggaaactaagaaatatcactcatcctgccatttgtatcccattgaatattggattcctcaaaaaaccaagctgaagtgatgaccatttggttctaggttgtatttcccattctgaagttaagcagaaaaagaaatgtaaggatttatagaagaaatgtttaaaacgatgagtcatttgtacttgttttctaattaaacacagtaataaaagataggccagagaactttgaggattttgatatgtcaaaaatttggctataaggacgtggggtttattacacaattgatgtgtttagatagtttattacaaactgcttctgtgaaaaatgaaacaatagggaagaggaagagaagattatcaggaaaggaaagtaggaaagattgggataaagagcatgtatcaaaatgataaagttaacaaaaaaaagaacaggtagttttgttaggtcataggaatgtttgactagatggaaaataaaagtcagagatatctgaaattctgagaaaaatagcttaaatcttctgaggtaaagtggatctttaaaaatattttttttatttttttgagatggagtctcactctgtcacccaggctggagtgcagtgatgcagtcttggctcactgcaacctctgcctcccgggttcaagtgattctactgcctcagcctcccgagtgcctgggactacagggatgtgccaatatacccagcaaattttctgcatttttattagagacggggtttcactgtgttagccagtctggtcttgatttcctgacctcatgatctgcccaccttggcatcccaaagtgctgggattaaaggcgtgagccaccaagcccggcctagtctttatttttatgattttttttttagagatgcggtctcacaatactgtccatgctaatatcaaactcccacactcaagcacttctcccacctcagcctcccaagtatctgggactacaggtgcagggcaccatgccaagcaaaatgatgttactcttacccacagaggccaggttcacatagttctccaacatcacatctctgtagaggcatttctcagttgtgtccagtaaagcccactcctctggggtgaactccacagccacatcatcaaacgtcactgaatcctaagtcatcacacacatgccggtttgagccaatgaacactgccatgaatgttcactggagaatgaggaaggggaaacttatactcacttatatgtggttctgagctctcccaagatctactccagtgtttaatgtctcaggagctcttgtgtctaagcaatcaaggtgaacctactagaggcatatgccttgaacagcactttaaaaatttttttaattctttttttgtttgatctatttttaatttttaaatacttttatttttaaattttaaatttttattttgatgagaacagtacttcctaagcatgaatttttacctatcatctatctatctatctatctatctatctatctatctatctatctatctatctatctaatctgtttatttatttctatataaagacagggtcccactgtgtcacacaggcacaatcgctgcttactgcaccttcgatctcctgggctgaagttcccctcccaccccagcctcctgagtagctggaattacaggcatgagccactgcacactgcttacactttatctcagcacaaccagtttaggagctcttcctgtcccattggtgtctatgccgcacactcctcagcacactgcagatacctgataaatgctgataagtgaataatttgataaaaggacactttcatcagctttatcatctgtcactgcacccagcaatgtaagaaagatgcagttggcaccatgaaggtcaagcttaagtagtaattactgagctactggactgattttcaagttaacactttatgtataggaaacttcattccctggggaaattcatctggggactcagtctttgagtaaggcttcatttgctctaagaaaactctggagatgagtctgtctagaaggaaatatgtctacctattggatgtaagcatgtcattttgtacaatggcacattttctttttacctgataagaatttgccaggtagtcctccaccatcgttcctatctttgtcttttcttcaaaagggcagattggttccctgggaaaaaaccctagtggaaaagtaagaaggcatgagaagccaaagctgcccacagtctcatgcccagaagtcattccatcctagcttgaaattcccatatgctcctgcacactcgagaaaactacacacacacaacactttcatgaaatgccatagtagtcctgtgtcacctagactcagataagcagacatgggccaaactgcctgttgggtaaagggatatagcttcatttttcaaggaaacttacaccctgaaaaatgtgactatctatctacccatagtagtaacactcatgaagcttatgtagcatttcctaagacacacaaaccagggctgaattctaaaacagcattctgactgggcacagaggctcatgcctgtaatcccaatattttgggaggccaaggtgggcaaatcacttgaggtcaggtgttgaagaccagcctgaccaacatggcaaaacctcgtctctactaaaaaaataaaaaataaataaaaaaatacaggagactgaggtaaagaattgcttgaaccagggaagcagaggttgcagtgagtcaagattgtgccactgcactacagcctgggtaacagagggaggctccatttaacaaacaaacaatattagccaagcctggtgatatgtgcttgtggtcccatctgcatgggagactgaggcaagagaatcactttaacccaaaaggtggaggttgcagtgaactgagattgcaccactgcactccagcctgggtgagagagcaagattctgtctacaataaataaataaaacaaaacaaaacaaaacaaaatagtattctacatcttacttcaattcctcctaaaagaaccagtggtggctcatgcctgtaatcccaacactttggcaggccaaggcaagcaaatcacttgtggtcgggagttcaagttcagcctgacaaacactgagaaacccgtctctactaaaaatacaaaattagcctgtaatcccagcgactcgggaggctgaggcaggagaatcgcttgaacccaggaggcagaggttgcggtgagccgagattgcaccattgcactctagcctgggcaacaagagtgaaactccatcttgaaaaaacaacagaacaaaacaaaagaaaaaaacagtggcatgcctgctcaggcccagcgcactggactcttatgttgtggaggacgacctaaatcagaatctctgaaaaagagcatcaacaaggacttaccatgggacaaatcagtgactgccattctctgaagctgatggtcagttgtgcctcaatgctctcttccttgatgccaagattgcctcagggcaacttatgaatctaggtgaatagaggcaatctccattcctctttgtacagggttatttgaagtcctgtttgtatcaagcatcaaacatcagtcatcgaacattatgcatgagctttctcgctgcaggtgacaaatgtgaaggccaccaaaaactgtacactcagtatcgtcactcagtaatgatagtattaataacagcaactgacatttactgaggcctagtatgtcagaagtagctctactagctatatacatgctcacttaattatcataaccatccttcccaatagctatcattacctctatctgtctatctatctatgtatctatgtatctatgtatctatgtatctatgtatttatgtatctatctatccatccatccagacagggtctcactctgttgcccaggttgaagtgcaatggcactaacacagccctctgtagcctagacctcccaggctcaagtgatcctcccacctcagtctcctgaataggtgggcccacaggtgtgcatcaccacaccttattatcattattattatcattattattactattattattatgagacagagtctcactctcccacccaggctggagtgcagtggcacgatctcgactctgtaacctctgcctcccaggttcaagtgattgtcaggcctcagcctcctgagtagctgggattacaggtatgcaccatgcctggctaatttttgtatttttagtagagatggtgtttcgccatatcagccaggttggtctcaaactcctggcctcaagtgattctcccacttcagcccccaaagtggctaggaatacaggtgcacaccactgtgtggggaaaagaaatagagaccagatttttactgtgtctatgtagaaaaggaagacataagaaactccattttgatctgtactaagaaatattgtttctgctttgagatgctgttaacctgtaactttagccctgaccctgtgctcacagaaacatgtgctgtaatgaatcaaagtttaattgatttagggctgtgcaggatgtgccttgttaacaatatgtttgcaggcagtatgcttggtaaaagtcatcaccattctccattcttgattaaccagggacaaaatgcactgcggaaagccgcaaggacctctgcccatgaaagcctgagtattgtccaaggtttccccccactgaaacagcctgagatatggcctcatgggaaaggaaagaccttaccatctcccagcccaacacccgtaaagggtgttgcgggaagtcaaggaccccaaacggagggaccggctgaagccatgacagaagaacgtggattgtgaagattttatggacatttattagttccccaaattaatacttttgtaatttcttatgcctgtctttactgcaatctctaaacataaattgtaaagatttcatggacacttatcacttccccaatcaatacccttgtgatttcctatgcctgtctttactttagtctcttaatcttgtcagttgaggaggatgtatatcattccaggaccctgtaataatcgcgttaactacaaaaattctacagcatatgtgtttgagcaatatgaaatgtgggcacgctgaaaaaagaacaggataagagcaattgttcagggaataagagagataaccttaaactctgaccgctggtgagccaggcagaacagagccctatttctcttctttcaaaagcaaatgggagaaatatcactgaattccttttctcagcatggaacatccctgagaaagagaatgcacacctaggggtaggtctctgaactggcccaagcccccccgggggcgtacctgtctcttatggtcgagattgcagaggtgaaataaactccagtctcccatagcgctcccaggcttattaggaagaggaaattcccacctaataaattttggtcagaccggttgatctcaaaacctgtctcctggtaagatgttatcaatgacagtggtgcccgaaacttcattagcaattttaatttcacctcggtcctgtgatctcgccctgcctccacttgccttgtgatattctattaccctgttaagtacttgatgtctgtcacccacacctattcgcacactccctccccttttgaaaatccctaataaaaacttgctggtttttgtggcttgtggggcatcacggatcctaccaacatgtgatgtctcccccggacacccagctttaaaatttctctcttttgtactctgtccctttatttctcaagccagccgacgcttaggaaaatagaaaagaacctacgtgattatcggggcaggtcccccaataaaggggtctgtgctgaggagtagtgaaagagggaggcctctttgcagttaagaggaaggcttctgtctcctgccaatccctgggaatggaatgtctcggtgtaaagctgaccattcccattcattctattctgataggagaaaaccaccctgcagctggaggtgagatatgctggcagcaatactgctctgttactctttgctacactgggatgtctgggtaaagagaaacataaatctagcctatgtgcacatccaggcacagtacctttccttgaacttattcatgatacagattcctttgctcacatatttccctgctgaccttctccccacctgttgccctgctacacttccctcgctaagatagtaaaaataataatcaataaatactgagggaactcagagtctggcgccggtgcatgtcctccttatgctgagcaccaatcccctgggcccactgttctttctctatactttgtctctgtgtgttatttcttttctcagtctctcgtcccacctgatgagaaatacccacgggtgtggaggggctggcccccttcaccactaggtctaattttttgtatttttagtagagacaaggtttcaccaggttgcccaggctggtctcaaacccctgggctcaaacaatcctcctgccttgacctcccaaagtgctgggataataagcatgagccaccgcgcctggctcattacctctatttaatactgaaaaaatcctacattcaaataaccctaataattagtctgatatttgtccttagagcctgatctcctgtggatgctgttaccccctaatatgaccaggaggcagtccagacctgcacagaacacttaagtagtcaccagccacgtgtgttattgctaacttcactatgtacctaagatgactgaagaacagaatttaaaatattcaaaagatggccaggcgcggtggctcacacctgtaatccctgcactttgggaggctgaggcaggcagatcacctgaggtcaggagctcgagaccagccttggcaaacatggcaaaatgccatctctatggcaaaacgccatctctatggcaaaaccctgtttcaccatgttggcgaggctggtctcaaactcctgacctcaggtgatccacctgccttggcctcccaaagtgttgggattacagatgtgagccagggtgtctggcatgcccttcttaagtagaaaggcttgtagctggtaacaactagaaaacaaataacgtccaagaaaataaaaatttaaaaaaacgaaaggcctacagtctacacgtgttcttatttacatacagaaatagacacaccctaaacaactatgttttttccatccaaatgtaatgtgtcaaaaataagcaaaggacaccaaggcaatgccagattctcagatgagacattttttagcaaatatatggaagtcagagccctcttgaaaccaatttaacaccggtgctcaccaagaacactccggaatcgccaggttcctgacgcgggaggatgcggggccagagccaaccttaccagaatggcagaaatccttttcctttcggaaagaaaaaaattcaccaaggttgctttagaagcttttgaagaggggagcacagcggatgaaagcactccagaaaacatcccatggacgcgggataaacacacttcctgacgcggctcctgacgtggaccgactgaacctgcagctgggaactggccacgctgggaggaccaacaacccctggagaagctagtgaaatgagcaggatcagagaggctcctgggcgagcgcacccaatccttcctttggcatcccccgcctgtctccaggacccccaagcaggggcggaactcaccacagccggggtcgactccaccaagataaaggtgaaacagcactgaccgtgggcagccagcgcgggaaaagatagtggcggcgggctgatgtcacttccgctacgagcttcgggaaggacggggcttctgggatccagtttcagccacgtaggaccaggttgttagaaatgcttgttccccggtgcataaagaaatagcacttgaacataaatttaatttcctcagtaagcccattttacttttggcagaacaggtacactagccagcagttttgccactagagtacactaaacaaaggaaacagggtcatttataacctgacgtgtccaccctactgcagcgtccggtttccattggctggaatggaacatcacattctgtatttgacccggttggctaccaagtcagaactttttaaaagaagcaaaggcagaggagaacaaaggaaggaggaaataacttgtggaatgctgagaaagctaaaaacaccttcaaataaggaagaggaacaggctatgacctaatgcttgcttggaccagtataagcatgccagggcaaatatttaggctaaattgtgagagctaagaacataaagtacattgatttctttattacacctcacagatacttaagaatgttagcacaggtctttgaatgcatttcgctcctaagaagagttactatttatttctaattagatggagagtaaagtctctttgaagaggaacctctacttttcagggtcgaacacagaaattctagtttcctcctgggtgggtgcagacagggcctgggttggctcagagagtgggatgcagaaacaggttcagagaaaaggtgaggttacaaccacgcctctggatggaactgtgggtagagggttggggcccgtacttggaggtggcttagaggttggacccggcctagcccctgctacaggtggacagatgggctggaaaggctgggataggggatgggacacaccccagggaatgctcctccaaagcttttccccagtgggcgcagtttcgttcttgttgcccaggccggcacctggctcgaccccgtctctattaaaatatatatatacatatatatacacacatatatatacatatatgtgtatatatacgtatatacgcatatatacacatacgtgtatatatacgtatatacgcatatatacacatacgtgtatatatacgtatatacgtatatatacacatacgtgtatatatacgtatatacgtatatatacacatatatacgtgtatatatacacgtatatacgtgtacgtatatatacacgtatatacgtgtatatatacgtatatatacacgtatatacgtgtatatatacacgtatatatgtatatatacacatatatatacgtgtatatatatgtgtatatatatatagccgggcgtggtggctcatgcctgtaaaaaataaaataaaatatatatatgtgtgtgtgtatctacataaaacttttttgtttgcctctcctcatgttcctagagcctttccatgattcttccacattgacaaagatgccagtgaatggcatggtctatctcttccattcagtcaggctttctgtaggcctttgtttcttcattctttatttcttagaacctgctgattccattgcattttcctttttttttttttttgagacagagtctcactctgtcacttagagaagagagacagaccctctcatattgttttatattgttttatactcagaaaaagaaagaaaagcaaaactaaaggcaggtagcccagcacctaggaaccagatctgaaaccaggcctgggcctgcctgacctaagcctggtaattaaagatccacccctgacctaaccggttatgttatctatagattccacacattgtatggaaaggcattgtaaaacttcccggtctgttctgtttcactctgaccacaggtgcatacaacccctatcacatacctgctccttgctcaatcaatcatgaccctctcacgtggacccccttagagttgtgagcccttaaaagacacaggaattgctcactcagggagcttgactcttgagacaggagtcctgccaatgctcccggttgaataaacctcttccttctttaactcggtgtctgaggagttttgtctgcgccttgtcctgctacatttcttggttccctgactgggaagtgaggtgattggtggatggttgaggcagctccttaggtggcttaagcctgccctgtggaacatccctgagggggaccacgaccagcccgagcaatgcagatcctgagagtactcccaggtaggcatttgccctggtgggacaccttgccagagcagtgtgtggcaggcccccatggaggatcaatgcagtggctgagcacctggaaggaacgggcacctagagtcttgacatctaaaacttggtaagactagtctttggaacttgccactccgttttagtggaagtgtggcctgatcacccacggtgtgcctttatcagcactttggttttggttttggttttggttttgacttggtttgaattgcttgacaggaccagtcttgggaacatgcccactccatttgagtggaagcatggcctgatcacccatagcgtgcctttattggcactttagttttggttttgacttggtttgaattgcttgacaggactggtcttgggaacttgcctactccatttgagtagaagcgtggcctgatcacccacggtgtgcctgtactggcactttggtttttgtttttgacttggattgcttgatactttggttttggttttgacctggcttggatttctggatagtctgattttggttttgattttggtttagtgtaaactacaaaggtgtgtgtgtgtgcccttttaacccgttctttgttttgtggtgtgcatgtggtgtgagcgtggtgttttgtctcgaggaaacaggggtgaggcaaaagtaagcccacctcactaggaactatgttgaaaaattaaaaaaaaaaaaaaggagatttaaaggagactatggagtactatgacaccaggaaaacttaaaactttgtgtaagatagaccggccagcattagaagtaggttgaccattagaaggaagcctggacaggtcccttgtttcaaaggtatggcacaaggtaacctgtaagccaggacacacagaccagctcccgtacatagacacttggttacagctggttttagagtcccttcccccaacacagaatggttgagagaaaagcagcataggtggctatcagaggcaaggaaagactagcagagagagagaaaggaaagatacagagaggaaaagaggcaaagacagagagaaagagacagagaggaagagacagacaaagagggagtcaaggagagagagagagagaaagaaagagagaggcagagagagagaggaagagacagaggcaaaaggaaagtcagagagagacaaaatcaaagacagaaaaaaagagagaaagagatagacaagtagttaagaaaaaaaaagccgtctatacaaattctaagttaatttggacaaaacaaggtcttattaatagcaaaggataattaaaatcccaaacttacaaggttttcaacaaaagtaaagtttgctaaaagttaacagcgtaacatgtattatagtaacttctattcttgtggccttagacagtctagtccacagacataaaaaaaaaggttcactttggaagagaatggttatcatcttcaaaaaaaagagttataaaaaaagtgtgttaaaaaagaatttatgcaagaaatgttgtataatttaaaagtaattagtcctcctaaatgtaaaactattgaagagacagtttatgtgcaaggtgtataaggaaagtaaagtatatctttggtaaaaggattataaggaggcataagaatgtggatttttacctacattaaaaggttaaaaatatgtatattttgttttaaaggtttaagcaagttttgaaacgttaattgggtgtaaattctgtgggtaaatatattagctaaaattaaaggggtatcatccagtttctctgtatactggatattaaaataaaagcataacaggtttttcttaaagcaccaacctgctctttagcaaaaattttaaaaggttaaaaagagtctataaaatcttaccttatggtcaaacattaaaaattagataaatatgtctacaagtttttattaaaattaagtttaacattaataacacactaatataaagataaaatttagcttatctggtataaaaataataaaagaagcattattaaatataaaatggtgtttagcttcctttggtctaaaaaccaataaaaataggtgctaaaggaaatttctcagtaaaaaggcactaaggactataaagtccactgccaaggtccccacatttaaaacaaaaggtcaatttcttagaaattatatacttgatttatcttccacttccctttccctcaaaactaaaagtcttttagcacatgtaccacccctagaatttccggtcaaccagcaccaggctgaagatcatgttctcattgaaaggtggaaagaagaaaacctcgagccagcctgtgaaggacccttccttgtgctgctaaccaccaagactgctgtttgtacaccaaaaaggatggactcatcacacccgagtcaagaaagcgccaccctctccagagtcatgggccataatcccagaagaaaaccctaccaaactaaagctaagaaaaatttaactgtttttcatctattctattactctttcttctttccgcactctattgatgaccatctagttattaacataaccaagtcaatttcacctcaaactattgcatttaatacttgccttgttataccctgtggggacttgccaagtcaaagacagctctctacttctgaaaagtacttctgtccctcctgactctcctcagactgggcattagtaaactaggaccatttaatttggggagatttcgataaagaccccagtgacaaccaagagtcttgcccccacaatgtagagctttcatgccatagttggtccaacgttctgtggaccactaaagagcaaggatgactgccccaaccggtttttgtaatttcctaaaaccatacaatcattttactagaggatcatagaagttaaagacttaaaacaaactttagcaattaagacaggataccaagatgtaaatgcctggttaaaatggatcaaatattccatctgcatgttaaacaaaagcaattgttatgcttgtgcacatggcaggccagaggcccagattgtccctctttcactaaggtggtcctccagtcaaccaggcccaggctgcatggtagctgttttccaggattctacagcctggagtaataagtcatgccaagctctctctgctatattccgaagtctggtaccctgtgggttagcccccaggagatatccagcttccgtctcccaacactaaggtcacttcctgtctctcacgacagggaggaaacttagcattccttagagacctgaagggatgcgatgagcttaagaattttcaagagattatcaatcaatcagcccttgttcatccctgagcggatgtgtggtggtattgtggtggacctatactgggcactctgccaaataactagagcggcacttgtgctttagtccatttggctatccctttcaacctggcatttcatcaactagagggagaaaaataagacatcctaaattaagagaagccccttatgggtctttcaactatcacatctatttagatgcaattggaggcctgcaaggaataccagatcaatttaaagcttgaaatcaaatatctagaggatttaagtcaatattttagttggtgacagttaataaaaatttagattaaataaactacatctattacaaccaacagcaacgagcttttcatgagttaaaagaaaaactcaggtcggccccagccctggggctacctgacctgacaaaagtttttacacagtatgagtcaaaaaaaaaaaaaaaaaaaaaaaaaaaggcagttggagttttaacccagactgtggggccctggccaaggccagtggcctatctctcaaaacaactagacagggtttccaaagcctggcccccatgtctaaaggccctggcagcaatggccctgttagcacaagaagcagataagctaactcttaggcaaaacctaaacataaaatccccccatgctgtggtgactttaacgaataccaaaggacatcattagctaacgaatgctagtctaactagataccaaagcttgctctgtgaaaatccccgcataaccattgaagtttacaacaccctaaaccctgccaccttgctcttggtatcagagagcccagttgaacataactgtgtagaggtattggactcagtttattctagtgggcccaacctccaagaccatccttaaacatcagtagactgggagctgtacgtggactggagtagcttcaccaaccctttcaaagtgactctgaagaagacgacaagagttgctccagtcacacccggaagctgactggtccacgcacagctgaagcatgagaaaactcatcatgggactcattttccttaaattttggacttgtacagtaaagatttcaactgaccttcctcagactgagggctgttcccagtgtatacatcaagtcactaaagtaggacaaaaggttgctacgttcctattattttacggttattataagtgtactgaaactctaaaaaagaacttatttgtataatgttattctatacaaagtatgtagcccaggaaatgaccaacctgatgtgtgttatgacccatctgagcctcccatgaccacagtttttaaaataagagtaagaactgaggactggtgggtgctcataaacgatacgagtaaaatgttagccacaaaaaaaaaagaggtgcctgaacgagtcaccttgaaattcgacgcctgtgctgtcattaatagtaataagttaaaaataggatgtggttctcttaattaagaaagaggctatatgacagaaaataagtatgtttatcataaattaagactgtgtaaaaataaatgtagatactggtcttgtgtcatttaggctacttggataaaaaatgaaaaaatgcagtccaccttcaccaagggaaaagtggccattcctgtaccagtggtccgtataaccccttagaactagtaataacaaacccctttaatcctcgctagaaaaaaggggaatgtgtaaccctagaaattgatggagctggactggatcttcaagtaaatatcgtggtttgaggaaaagtttataaaccctctcctgagccagtatttcaaaccttctatgatgaactgaatgtgccagtaccagaaattccaggaaaaacaagaaatttgtttttgcaattagccgagcatatagcccagtctctcaatgtcccttcatgttatgtattagcacaagtgtactgtatgaatcattatcaatctattgcacaggaagacataagtagcaaaaataagagtgagaattcccactaataaaaagtgagagtctcaaagccgggaaatgagagaagacagaccctctcatattgttttatgttgttttatactcagaaaaagaaagaaaagcaaaactaaaggcaggtagcctggtgcctaggaaccagaccctaaaccaggcctaagcctggtagttaaagatcgacccttgacctaaccagttatgttatctatggattccagacattgtatggaaaggcattgtaaaacttcccggtcggttctgtttcactctgagcaccggtgcatgcagcccctgtcacgtaccccctgcttgctcaatcgaccacgaccttctcacatggacccgcttagagttgggagcccttaaaagggacaggaattgctcactcggggagctcggctcttgagacaggagtcctgccgatgctcccggctgaataaacctcttccttctttagctccgtgtctgcggagttttgtctgtggcttgtcctgctacatcaccagggctggagtgcagtggcatgatctcagctcgctgcaacttccgcctctcgggtgcaagcgattctcctgcctcagcctcccaagtagctgggattacaggtggccaccactaagcccagataattttttgtatttttagtagagatggggtttcaccatgttggccaggctggtcttgaactcctgaccttgtgatttgcccatctcggccttccaaagtgctgggattatatatattcctgtaggagatagaagcttcaaaaaataaaaacctacagccaagccaataaaatagagcacatatctcaccacaactgcaaagacaactatgctgacattactacttttagttggtgttgtgctggaggttaaaatccattcagtaaagcaagaaaatatatatttatataacctaatgactgaaagggaaaaataagtcattacttacagattatctcactgcctatgtggaaagggaaaagagtcatattaagtactttggactgaacaatgaccccaaaattcatttgttgaagccccaaaccccaatgtgagtgtatgtcaaaataggatctttagggagtatcattaaatgaggtcgagggacacaaggggctgtggggagggagagcgagagtgagagcacgacccgtttcttggtctccatcatgtgaagacatgaggaattaggcatttacatgccaggaagagagctctcaccagaagtgggccatgctggcactctgatctcagattttcagcctccagaaacatgcgaatataaatgttaaaaacaagtagtttagatagttcctcttcaaagggtttcattttgttacaaagtgttcctctgcaagaggtctttacttccttgtactgtctgtcctgaagtcttatttccctgttgcttaaattaaccttgcccaccagtctatcagcccctcccatcctgctgtgctcaggcatgcccaccaagaagtcaccccctccctgctgtaacagccttccctgccacaactgttcttccctgtactcttcaaattagctaactgcattcagtttagactgtgtggttcaaccccaaccaataggggaatgacacatcaactaaggccaagtgcattagggattaaaaacccctgctgtcttttgtctgatgagctcttgccattgctccatccacgagacacatgcttctgtagaagtaaatttgactttctgagaaaatttatgttcgactgctatttcttttgcagcacaaatagtatgtttctaacaatttggtggcctgtacaaggaccccattctcctcccagagggttttccatcctctcctgtgaggacacatgccccactgcctcattgcagtagcctcaggggtaaggaatggagacccccctagtgtgatgaataaacccggactctcagcaacatgggaagaaaagacctacaaataccgtggtgaccagataactctgtccacagaccaaggtaagaaatgctgcaggagctggcaaagtatttcctaggtggtcatgaccaagctaagaaaagccacaggggcagtgaaatattccttggtgaggacacaccaaggcatgaaaaactgcgggggtggtgaagtattccttggaaggggtatcttggaagttaatagtgtatgaataagatgcacaattgcatgtgaaatgagtgttaagtctagatctgcagttctgtggtcacctcatatggcttagggtgacccacctgtaaaggagtccaggatgggggtttataccaacccaccaatgccaagagggacctaacatggctagagaaggatgaagtgaaagaagaggcaaaaaattcccagtaggggggattgagcctcacaggaacctccagtagcaaggaaggcaaaaaatttccattaggggaaattgagcctcaccccatattgcaagaaatttccagtaggggaaattgagacttaccccaaaaggcaagaaatctccagtaggggagattgagcctcaccctaaaaccatcaagatgggaaataccccaaacaaggtaagaaaaaggataaagctagcaacaataatattcccctgatagtcccctaggcctaatgttaaaatattagaagaataatgaaaagaccttagagaaatgataattaaaagaattagagaatctgtaccctgtatccaaaacattacaaaagctttcaatacacaacaagaaaaaaataaatgacctataaaattctgaaaaaaactcaaagagcaaatggagaaatatgcaaatctagaatagaagaccccctcagatgagggatgttaaagcttcattttgttactaatcgttggccagatattaacaaaatattacaaaaaatagagaaccagaaatacagacctatagaagagtttctttaaaaagcccaaaaaaacaccagtgcagtggctcatgcctgaaatctcagcactttgggaggccaaggcaggcagatcacccgaggtcaggagttcaagaccagcctaaccaaaatggagaaaccccatctctactaaagttacaaaattacccaggcatggtggcacttgcttgtaatcccaactacttgggaggctgaggcaggagaatcacttgaacccaggaggcagaagttgcaggagctgagatcacaccactgcactccagcccaggcaacgagtgaaactctgtctcaaaaaaaaaaaaatcccaaacagtatatgtaagaagagaaaaagaaaaacaaaagcaaaaggcaaaaatcttgctgtccaccatacaacaaagtaccaagggagccagacatataaagaacctagaccaccactgtccaggtgatataaaatgtatgaaagagtaaagccaggagactcaaaggaagaaaaaaaaaagacagaaaaattgtttcaaatgtgaaaaaataggtcactttaaaagacaatgtcccaagtgagaaagaggaagagactgagtgtgagggagagaatgctgagaccagatcggtcagggagaccctaacccagtagcgctagaagaattgaagacacacacacagaaatatagaggtgtgaagtgggaaatcaggggtctcacagccttcagagctgagagccccaaacagagatttacccacgtatttattaacagcaaaccagtcattagcattgtttctatagatgttaaattaactaaaagtatcccttatgggaaatgaagggatgggccaaattaaaggaataggttgggctagttaactgcagcagaagcatgtccttaaggcacagatcactcatgatattgtttgtggcttaagaatgcctttaagcagttttccaccctgggcgggtcaggtattccttgccctcattccggtaaacccccaaccttccagagcgggcattggggccattatgaacatgttactgtgctgcagagattttgtttatagccagttttggagccagtttatggccagattttgggaggcctgctcccaacatgtcccccttctttgatttgcagattgataaaagcaaaggagctttgtcatggtgagctacttctcataggagtcaggatctgcatctgaagactatacaaagataaataacatggattaaaagcacaatcatcattgaaattacagagcttccaagtgtttttatccattttaatgggttactagctgctaatttgtctgcagctcctttaagcaccccagttcctggcattaaggtcaggtgtgcctgggatgttttaaaatctgttcttttaattttgcaatatccaaaaacaagtctgtagagtgtccttttagatacttttttattctttccaaaattgtgatcttattaagagctattaatagtttccacaaatccttaatgtttagctcctacaatgagccatatcatttgaggttgaagtgccactatactgctatggttccagataataggaactcttgttgtacttcttatcatttctaccatctgaccattttgttcagaccagctgaacatagtgtggctggggcatgcagactgagaggtgcaattcaagctaaacatccccttaggggaccaatcaataaagattccataggaatcattgtgtagcacctctacctgttctgcaatgcaattttcctaaacaagcacattcattttttctaactgggtccaatcctgtttacaaataggtttttgagggtggtatgcctcaattataggagcagatttattatggtaaatactgagatcagaaagcatgtgtaactgggtcatagagtgattgcatccaggcattattgccagccaagattgatcaatatgcccaataagtataattgttctctgtgtcagctcttattgaaggaatactcacagcagtggtgataaccactatgatagctaccattaaattattcattgtgactggttgtcccactttcctcagtttttcttccaccatctgtgacagcttcttgatctgtccccaggtgggtggctgtgttcaacgggtgttactcgtgacagttggggtcctcctcagcatcagtcttgacatggctgcaactggggggtccttgggatcctcccggagtctcttcctcggcatctggctcatgataaggtttcaggtgtcttgatggtatccaaattggctgttgattttggcctggagaaacacaagcataacctctaccctaagttattattttacctatttcccatctttttattattggatctctccaccaaatcagttgttctgtttctgtctttgcagctggtttctgtagatgctgttcagctgctgataacatctggcctttgggcaggttcaaaaaatttaatgttaataatgttagattcagttgtatctgtgtggttccatattctccgtctccccttttctgcttttgcaactgctgttttagggagagattcattctttccactatggcttgtctttgagaattgtatgggataccagtaatgtgtttaatactccacatagagaaaaatgtagctagagattggctagtatatcctggggcattatctgttttaatagaagctggaatgcccatcaccacaaaacactgcaaaagatgatgtttcagacaggccaaacactctcctgattagcatgtagcccatataaagtgagaaaaggtgtccacacatacacatatataagctagtctcccaaacgaaggaacatgtgtgacatccatttgccaaaaagagttaggttccaatcctcaaggaataactcctcctgtaaaagatgaggaatgtaccatttggcaagttgggcatcactggataatatttttagcttctttcctggtaattctgtatctgcgtttgagaccagaggcattaacatgggttaaattgtgaaaatgtctaacattagatactgcattagcatctaggcaatcaggcttttgattcccttcagtcaaaggtcctggaagaggtgtatgagccctaatgtgactgatgtaaaaagggtgcattctacttctaactgctgtttgcaactgggtaaataaagtcatcagttgttcatctgtatgaaataataactgagcattttcaattaactgtctgcaatgaaccactatgaagaatcagaaatcacattaataggcatatcaaaagcagtcaatacctcaattactgctagaagctccgctttttgagctgaagtatagggcgtctggaaaactttactttttgagacaaaataagaagctttaccattactagacccatctgtaataacattctcagcaccttcaattggtttaaatttagttattttggggagaatccaattagttaatttcaaaaactgaaacagctttgttttaggaaaatgattatcaagaatacccacaaagtcagctaaatgggtttgacaagtaagactatttataaaagcttgctgtatttgtgccttcgtgagagggacaataacttttccaggatcatatccatgtaatttaacaatccaagttctcccaatccctatcataatagcaatttggtctaaataaggagttagagtccatgaattagtatgtagaagaaaaacccactctactaagtcctgttcttggaaaataacaccagtaggtgaatgctgagttgaaaaaattagcaaatctagagtcttctctggatctattctatttatttgagctttatggacttgtttctcaatcagttgtaactgcctcagcctcctttgttaaatgccaagggctagtgagactaggatttcctctaaggatagaaaacagattactcacggcataggtaggaatgcctagagcaggtcgtatccaattaatttcccctagtaattttcaaaagtcatttaatgtttttaattgatccctacatatggttactttctgtggcacaatgatagtgtcatttactaaggtccccaagtaggagtaaggagtagtagtagtctgaattttctcggttgctataattaaaccagtgcaagaaatcgaattttgcaagtgatcataacattggagtaatatttctcaaatggggacagcacaaactatatcatccatataatgaataatgtaacaccaaaaattttttacaagtaggttcaattgcttgcaccacgtacatctggcaaattgttggactgtttaacatgccctgtggcaacactttccaatgataatgcttagcaggctacaggttgtttactgctggaattgtaaatgcaaaccgttcacagtcttgctcagctaaagggacagtaaagaaacattcttttatatctatgactattaaagtccaattttttggaattatagcagaagaaggcaatcctggctgtaatgctcccacaggttgtataactgaattgatagttcttaagtcagttaacattctccatttacctaattttttcttaattaagaaaactgaagcattccaaggggaaaatgttggagctatgtgcccattttctaattgttcagtaactaatttctctaaagcctccagtttctctttacttagcggccattgttctatccgaattggcttatctgttaaccattttaaaggtataggttctggaggcttaacaatggccgccatcaaaaatgacatcccaatctttggcaggaactttgtctttccacttgaagtggttttttcaaaccttgcaaatttttttctagtcccataccagggacataccccatttcatgcatcatatgttgattttgagggctatataattgttctggaattagaacttgtgctccccattgttgtaataaatctcttccccataaatttataggtacataagttataattggttgaatagtcccaggttgtccatcgggcccttcacaatgcaaaatataactactttgatatacttcaggggcattaccaactccaactatgttaaattgagcaggttgaattggccacgtggatggccagtgctggagagaaatgattgaaatgtcatctcctgtgtctaccaaacctttaaatttctttccctgaatagttatttcacaggcaggacatttatcagtaatttgatttacccaataagctgctttgccttgtttatttgtgcttccaaatcctcctgttcacttaatttcacttttccccattcccacatgtggcacaatcaggggctgtggtatgcactctcctggctctgctttccagggaacagaagtagatataacaatttgaatttcccaaatgtaatctgaatcaatgactcctgtatgtatttgtatgccttttaaactttaactaggccttcctaaaagtaatcctattgtcccttctcgcaagggtccacagactcctgttgggaccttttgcaaggcttccccaggcagaaggcttacagcttttgtgcagcataaatctactgcagcactaccagctgtggcaggggacagatattgtacaggggtgagggaacggcctgagttggaaatgccccactttagaatggggcccaggacaggcccctcatggtgtttcctgaaattgggttcccatctttatcaaacttagggtgacactgattagcccaatgttttccttttttatattttggacatatttcaggatcagcagttttctttcttcccctatctggcaggctgactcgctgattttttctacattcttttttagtatgaccatgcttcccacagttaaaacaagctccaggaaatggaatatttcctttatccactctcagtcctgccattgcctgtgccaacaaagtagctttatgcagattacctccgataccatcacaggacttgatataatcaactaaatgtgctttcctgaatttaaaaggaaaaggctcaaatgtagctataatatttccctgttgatctagggggtgtattctaacagggaactgccaagcctctaaatcacccctcgtctagcttgctgaattcctgcctgagctcaaacagtcactggggcaactacttttcacccagtgtcctccggaaaagaaagatctggagggtctttttcttcaaaataataatgacggggtgcagaagggtagagatgaacctctccctcctttgctgctttagctttagctggcaaataaacctgctctgtaacctcttctgttactttgttatactctagttcctcatcatcatcagcgtgaaaaagctccaaggtgaaacgaaccagaccccacacctgtcccattgttaccctgatgcttccaagctccccttcttactcaccatggggattgctttaagagtgctcgggtgtcctccagctagttttccattccaaccatcgctctggtgacacttcaacctggattcaaacccccacgatggacaccacttgccgaaaccagcccagtcagggagaccctaacccagtggtgctagaggaattaaagacacacacacagaaatatagaggtgtgaagtgggaaatcaggggtctcacagccttcagagctgagagccccaaacagagatttacccacgtatttattaacagcaaaccagtcattagcattatctctatacatgttaaattaactaaaagtatcccttatgggaaatgaagagatgggctgaattaaaggaataggttgggctagttaactgcagcagaagcatgtccttaaggcacagatcgctcatgctattgtttgtggcttaagaatgcctttaagccattttccgccctgagcaggccaggtgttccttgtcctcattccggtaaacccacaaccttccagcgtgggcattagggccattatgaacatgttacagtgctgcagaggttttgtttatggccagttttagggccagtttatggccacattttgaggggcctgctcccaacagagaagaaacaggggatgacagagagagagaaaaaaagagagattgcaaatgagatagagacttaaaaaaaaaccctatgagtctaaaaataaaaaatgtagagagaaacaaaaaaattagagacagagatagaaggagagaatgagtgagaaagagactaaacgagacagagatcagagagggacacagaaagtgagactaaggagagaaatagtgtagaagagagaggaggccaggagcagtggctcacacctgtaatcccagcactttgggaggctgaggcaggtggatcacgaggtcaagagatcgagactatcctggccaacatggtgaaaccctgtctctactaaaaatacaaaaaattatctgggcatggtggcaagcgcctataatcccagctacctgggaggcagaggcaggagaatcgcttgaacccaggaggcagaggttgcagcaagctgagatcacaccattacactccagcctgggcagaaagagcgaaattccatctcaaaaaaaaaaaattgcaaaaataaaaaaagaggaaaagacaggagacaaagagacaaaaagtgagtgagcaggtgaggagagagattgagaactatgagagacagcaactagtagaaaaaggaggcaggagactgcttgggtgccacagcacccacaccatcctcttgcccctgtcatttggacccaatagctgacccttgatagaggagagcagacctcgcagcagcctgagcctgggcagccgtgcctccaccatctccccactcagcagcctaagtcccaagctatatgtgatgcaactctcagagtctatggatgtgtaaaaatgtatactctggcaaacaacttacagatagttacctaatatatacatacatacatacatacatacatacatatatgtgtgtgtgtgtgtgtgtgtgtgtgtgtgtatatatatacactaataagcaaactctaagaaagtcaccccttggaggaagggagccaggattaaggccgttctaaagtgtccaaactgattacaccaaaatggccccaaattggttgcctaaagtacctactagtaatgtaaatcaccttactcactaggtagaggctattctcttttcaagtgcaacagccagtaatgtagttaaagcattaattgaaaacattatacccaagtttagattaatagaaaatattgattcagaaaataagacttatttcactgcacatgccgttaaaaaattagcccaagtactaatcataacataaaaataccatacccccggcacccaccttcatcaggaagaatataaaaaaaacaaactctaagaattcatctaaccgaattagttttagagattcggttaccatagactaaatgcctccccattgccttgttaagagtcaggaatgcccctcggaaagatggtggcttatccccttatgaaatggtatatgggttgccttatttacactccactgctgacattcctacattcgaaacaaacaaacaaaaaatcagttttgcaaaaactatatacttagtctaccttccactctctcttccctcagaactaaaggccttttagcacaggcaccacccctggatttcccagcacacctgcatcaacctggagatcacgttttcattaagagctagagggaagcaaaactcgaaccggctttgggaaggacccttcctagtgcttctaaccaccaagaccacagttgaaacagcaaagaggatggacccatcacacccgggtcaaaaaagcaccaccccctccagaatcatggacagttattccagggccaactccaaacaagctaaagctaaaacgggtttaatcctcttatgttgcaactctttcttttccccttctattactagtcctctcatgattaatgtaactaagtcaagttcaccccaaactattacttttaatgcttgccttttgatgctctgtggagatttaccaagccagaggtaacactccacttcagaaaagtatctttgtccttcctagctctcctcagactaaaaatctgttaactaggataagttagtttaaaaatagcttgacaaagattccagtataaactggaatcttgtcctcctagggcagagcttctctgccaaagttggtccaatgctctataaaatactaaagaacaaggatagattgctctaactagtacttgcagtttcttaaaaccttatatttattttactaaagcacttacccctcccaattgtcagctgaaccatcataatccagtacagattaccatctctgctccccagagttcttccccttcattaagctacgtctatagtataagagcagaagtatcagggaaggacgctttaggatcctttaaaatgcacttcattgtttccccacctcctgcacccccttctccctctccaaagttctctgctaatcaaatcttttctcattatatacccaatgataaaaccaaagtacctgttacagaggttaaaaatttaaaacaaactatagcaattaaacaggatatcaagacacaaatgcttggctggaatggattaaatattctgttcacatgctaaacaaaagcgactgttactcttgtgtgacaggcaagccagagacccaaattgtcccctttccacttgggtggtcctctcatggactgggcataagctgtatggcagctgggcataaacagtatggtagctgtatgctagcccccttccaaaaccccacagcctggggcgatgagtcatgcgaaactctttcactgctgttccctgaggtcaagagccctaagggtcagcccctgagggccatctggcctccagtccctaatattaacttcacctcgtgcctttcactgcagggggaaaagttagcattccttggagacttaacagggtgcagtgaaaccaagccttttcaagagcttaccaatcagtctgccttgttcatccccaagcagatgtgtagtggtattgcgagggactattgctgggtactctgccaagccattagggtggcacttatgctctaggccttttccaggtgaaaaggccatccttttccccctctcatttcatcaaccaagaaagataatggcaaaagaccacaaaaacaaaaaatgcccttcgtgtgtcctttaatcctcatgtttatataaatactattgaagttccacaaagagtaccaaataaatttaaggcccataaccaaatagctgcaggatttgagtctatattgttctgatagttgactataaataaaaatgtaagttaaatgaattacatctattacaaccagcaacaatttaattataccaaagatgctattaaaaaaataggtcaacaattaaggctcatcagtcaaatgacttaagaaaataaaatagcattaaatataatactagcaaaaaaaaagaggtagaatttgtgtcataattaaaactaaatgttgtacttttatccctaatagcactgccaccaatgaatcataacaaaagtactacaaggcattactactttgtccaataagctagctaaaatttctaaaataaataatcccttcactaatttattgaaaaatggtttagcaagttaaaaggacttacgtcctaaatcctcacttcccttgctattatactaaatgtgatcattcttgttaagtgttgtattatcccttgcatccataagctaatttagaggcttataaaaacagctctcattaaaaccttccccaattctcccctaccctattcagacaaacttttccttctagataataattttttaaaaattcgacaaattcaagccacgttaaataaatttaaagaaggaagtgtataaattcaagaggggtcaaattgttaaaaacaagtagttcaaacagttcctcttcaaagagtttcactttgttacaaacaaggtattcttctccatgaggtcttcacttccttgtactgtctctcctgaagtcttattccctggtctaaataattcttgcctgccaatctatcaacccctcctgccctgctgtgctcagacatgcccgccaggaaaccaccccctccctgctgtaacagctttacccgcagaaactgttcttccctgcgctcttctaattagctaattacatttagcttagactgtgcggccgaccccaaccaataggggaatgaaacagcaactaaggccaacagggttagggattaaaaaccctctccattaaaaatgctctccattgtgtgatgtgctctcgccattgctccacccacaagatacactcttctatacaagtaaatttgcctagctgagaaaacttatattcaaatgctatttcttttgtggcactaaaaatttgttccaacaatagatttctgtggttttaacctcacttatttaaaattaaatggatttgtaagccatttggtctgtggtattttgttatggtggcctgagctaaggcagattttgtactgagaagtagaggtactgcaattaaaaacaaacaaacaaacaaaaaactaaaaacgtgaagcagctttgaaactgacaaatgagtagaagctcgaaaagttctgatgtgcaagctggaaataaggttgataagggtaattctggtgaggtgtcactggggaatgaggaacatgctattggaaaataaagaaaagacaacccttgatataaagtggtgaagaacttggcagaactgtattctagcattttgtggaaggtagagcttcagagagataaaattgagtatttatcactaagatctgtaattaaagtgttaaaggacacaggaagcttcattcttcctgactgcttacaggaaaatgcaaaagaggagacttgaattgcagaataaattgttaaggaacaagaaaccagaacttggagatttggaaaattctcagcctattcatactacaaaaattagaaaacttgtactgaagagaatcctcaaagtgtggctgaaaaatcatctcataaagagatcatgagtgggattcatggactatatcagccatcttaagagaaatgaggagagagactggattacactagaagagacactgccacttacattgtgccatgtaaaatggacagagaaggcagaacagaacaggcaaggctgtcacacttcttagattttacaagaagcggtcacagaaataatcagctttgaaagtgcactggcagtaaaagatggtttcattcctgccatgatctgcaggatccctgggaacagagaagactcttggaggagcatcttttaacaacccaactctggggcctacattatcttggcttctggtaaattttgacatgaatgtgccactggcagccactaaccaacaggggctggggtcaatctgcatgatttatctcacacagaacttgttaatgctatgatcttaggaatctaatcagcaaggtgaggcagcctgcagtactgacctcaccatccatgacccttcttcacagataccaagactcaggcaaccatgaagttgtattcagaagctgtaggtttaatttcagactcttgggatggcatctaaggccagtccatcagccattacaaccctcacaaggcatttaggacaaatctgataatcttctggtgtcactgccaataattaaagatggcaaccgatgagctaaatggtaacactcatacccttatattcatagggtttctccccagtgtgaattcttttttttgaaatgaagtctcactctgttgtccaggctggagtgcagtggctcaatcgatctcggctcactgcaacctctgcctccaaggttcaagggattctcctgcctcagcgtcctgagtagctgggactacaggtgcatgccaccatgcctggcaaattttttgtacttttagtagagatggggtttcaccgtgttagccaggatggtctcagatctcctgacctcatgatccacccaccttggcctcccaaagtgctgggattacaggcatgagccactgtgcccagccatgattttatgtctacctaggtgtgaggaaacaataaatgctttcccatattctttacatatgaagggtttctctccagtatgagtttgcaggtgaatattaagggatgaggaaaatataaatgctttcccacatatcttgcatacaaagggcttttctccactatgagttttcaaatgttaagtacgatgggaagaagtaatgaaggtttttccacattcaacacattcataaggcttctctcccatctgaattattgtatgttgagtaaggcctgaggatctagtgaaggcttttccacatttgttacactgatagggtttctctccactgtgacttcgtaagtgtatagcaaggcccgtgtactgagtgaaggctttcccacattccttacattcatagggttttaccccagtgtgagttcttacatgttcagtaagttgaattgatctagtgaaggctttcccacagtctgtatatttgtgtggtttttactccagttggagtttgaatgtgatcattaagatatgaggaatttctaacggaaattccacattctttacaatcaaaggacttctcctctttatgagttttcacatgtgcagaaagttgagaaaaattagtgaaggatttcccatatttcttagtctttttgaatttctttccagtatgagctgttacacactgctttaggtgtgaggagggtgtgatggttctcccacattcctgaaattcagagtttctcaccagcgtgaattcccatgtgattatcaaggcttgcaaaacacttaaagccttttccacattccttacatttgtacggttgtcttgcattgagaacttcaagatgttcagcaaggcctggagttagggtgaagacttttccacatggattaaatttagaaagttcctgtccaatagaggcttctttgtgcacactaagggtgtcttttccataacaattaccctcaaaagtgttccctccattctgagctctcatgtgtgtcttaaggaaaaacagctccctgaagacctcttcacaattcttacagagtttccatccactgtagcttcttgtctgctgatgaggggataaaggatttaaaacattttccaacatattaagagatttcacccatttgaacacagaaacattattttgatgacaattattattttacttttcaatgattaaattttttttgagacaaagtcttgttccatcttccaggctggaatgcagtggcacaatctgggctaactgaaacctccacctcccaggctcaagtgatcctcatgcctcagtctcccaagtagctgggaatacaggtgctgctaatgcacccggctaatctgtaccaagtcagccacaaacgccaggccatgttctgagctgattcataagggcagtccaaacccaggaataagatctcagagaagcacacaggttacctcgtagaccttttcagttgatgttggataagcctccacccacccagagtaagtacacacaagaaccagcaaataattgttacctccacatttcggcatttctgtgaaatccacctgaagatcctcaaaaggagccgtacataagcttgtatgccgggtggaacagtgaggccttgcctcgcattgtgctgtcggcaagtaatgcaccattgtgctactgctttgcaagggctggcaagtgtgagatgtagaagtaccggcctaacaatttttcaagtgactcttgacctagatgagtggtttcgtgcatggccaatacgattgtggctcccattaactgcagcacagctaccctcccatctggcagtctgttccatcctccttttattacttgccccccttctgcatggaagaagtctttttcttccttagaataggtagtaccaggtcaggtgtttgagggagtaagggggctgctaccgatgcccggtaaggggtagatgctgcttttcgagtttctgaatcagctcgagagtttcccaaggccactgaggtggaagctcactggtgtcccctgcagtgcatgactgccaccttctgaggtttccacactgcctctaataattgtagaatatcttgttgatattttatgtcctttcccccagagtttaacaggcccttttccttatataatgctccacactccatgcacttggagggttagaaatgcatatcgagagtcagtgtagatgtttacagtcttaccttcactgagttctagagcccgagttaaagaatgagctcagccttctgggctgaaacaccctgtggcaacggtttggcttcaatgacagcatccaaagttaccaccgcatatcctgcacatctttctccttgtgggttgatgaagctgctcccatccatgtataaatcccagtctactgatgcccatggctggtctcaaaggtcaggtctgctagaataaactgagtccaacacctctacacagttacgcttgactgggctctctgatactggaagcagggtggcgggacttagggtgttacagatttcagtggttatgtggggattttcacatagcaagctttggtacttggttaatctagcatttgttagccaatgatgtcctttggtattcatcaaggttaccacagtatgggggacatttatattcaggttttgcccaagggttagtttatctgcttcttgtgctaacagggctgttgctgccagggcccttagacatggtggccagcctttggaaaccccatctagttgttttgagagataggccactggccttggccagggccccacagactgggttaaaaccccaactgccattttttctctttctgacacatagagagtaaagggctttgtgaaatctggtagtcctagggctggagccgacgtaagtttttcctttaacttacaaaaggcttgctgttgtagaggcccccgttcaaaagacacctggtcgcccccctttgtaaccctgtacaaaggtttggctagtactgcaaagtttggaattcataatctacaaaaccccacagctcctaggaattcccttacttgccttctggttttaggttctggtaggttgcagatgacctgctttctttctgccccagggtgtgctcccctttccgaatagtgaatcccaggtagcgtacgtgctgtctgcaggtcttagctttcttcttggacaccttatatccacagtcttccaggtgccaaagcagggcatccgtcccttttgtgcacccaactgctgtggagtgtcccagcagaacgtcgtccatgtacaggagcaagacgcagcctaggtcttcagcaggaagcttttgcaggtctcgagccagggcctccctgaagatagtaggggagttcttgaacccttggggaagccaggtccatgtgtactgagtagtgacacctgaccccagatcttcccattgaaaggcaaacagcttctggctctcaggagctagtctgatgctaaagaaggtgtcttttaagtccagacaggtaaaccagctgtcctcagctggcagcagctctaacaatgtgtaagggttaggaactgttggtgcagagtcactgtagcttggttgaccaagcgcaagtcctgtgctggccggtagtccttggtccctggcttagggacaggcagcagggtggtgctccgtggagactggcaaggaactataactccacaggctttcacgcacatgagatgaacctggattccttcaagagcttctctgggaaccggatactgcttttatctaactggttgggccccaggcttaacttctatgagtatgggggtttggttgactgccagttccagaggattatcttctgcctatacttgaggccattgtttagctagagctggttttatctcttggcctggctctgttagaaaaagtctccattattcttcctgaggaactgtaagggctgtgataactcctgttcctggtaattttagatgtaaagagctctgttttgtaaaggagatggtggctctcagcttgctaagcaagtctcttcccagcaagggcaagggacagtcaggcatgtacaagaactggtgaactatttcatgtccccccaccgaggatgtctgtggtagacagaaagcctgcttagtggaaactcctgttgctctgattatatcagtggttttcttggataagggggtgaccagggtggtcactactgaatgttcagcaccagtatcgaccaaaaacttaatgtccttgcccccaattgtaatcctgaccgtgggctccttgggggcgcttgagcctggttgccttcactctggtggtccttcagccagattgaacaaagctccctcatctttatctgagatcttttgttccgaatcaccttgcttttccttcagttagggacacttatctttccaatgtcctatttccttacaataggctcattggttatgttgcaagcatgggcaattagactgggtattcttcccggaacccccctttccctctccttttgggggaattcccctaatggccatggccagtaagttggtgtttcgcttggcctggcgttcaccttccttacggctttctctgcagcttgttgcatctctgttcacaaacacttgattgactatttccagtaactgtgaggtattcatacccacaaacccagcctgtttctgcaattttctcctggtatcttctgcgctttgactaactaaggccatgttaatcatgcgctgattttcagggctatctggatcaaaaggagtgtacataaggtaagtctcacacagtctttcatagaattgcgctggactctcctcttttccttggatgacctcagagaccatatttacatttgtagcctcttgagcccctttctttagaccttctattaatgcctcacagtaccatgtctggtcccttgtttgggtcccattgggggtctgttcctggcagctgaattcttatatattactgggggttttggtaatctgctgggacgtactcctctagccacttagttgctgcctggagcacccttcgctgttcgtctgtattaaagaggtacatgagtagctggtggcaatcagcccaagtaggattatgagtctgcataatagtttggagcaagtcaattaaagcttgaggctttttggtgtaagatggagtattatttttccaattgaggaggtcaacagaggtgaaaggttgacacacaaaggcatgcctttccaccacgtctccatcctcatctaccccagtatatcgctgctctctcaggggtgtttggattccagtcttgggctgtaagcgagctgccaaaggaggagtttctcccacagcttcacttcctcttttgtccactctgggtggtctaggagtgtggctatctggcagaggtataggtgctgtgggctcaggagtggggaccccttcctctcgataaggagggggtactgctggtaccaattcctgccatgattcttctggtgttgggtctgacaggacttttggtgctgatttcccttggtgtgtggagcaagaaccttccttaactgtccctttcctactagtactgctgctgcctgtcatcttaaccactgtgggggatccaaaactagctttaaccaagaatctatatacaggaaatgatctgggtgcctggcttatgggttaccctgtgccataccttcgagacaagggacctgtccaggcttccgatggccaatccacctctaatgcaggccagtctatctcacacaaagttctaagttttcctgctgtcataataactccatagtctcccttaaatccctttttgaaatttttcaacatattcctagtggggtgggcttactttgtgcctgacccatgtttccttgagacaaaacaccacactcaaaccacaagcacaccacaaaataaagaacgagtaaagaggacacacacacacttttatagtttatgccaaaccagaatcagaacaaaatcagagtatcagggaatccaagccaggtcaaaaccaaaaccaaagtatcaagcaatcccagtcaagtcaaaaacaaaaaccaaagtgccagtacaggcatgtcatgggtgatcaggccacgcttccactcaaatggagtgggcaagttccaaagaccagtcttaccaagtttcagatgtccggactccaagtgccagttccttcccggtgttcagccactgtgttgatcctccacgggggcctgccacgcactgctccagcgaggtgttccaccggggcaactgactacctgggaatgctctcaggatccgagtcgctcaagctggccagagtcccccagagggatgctccacaggggaggcctaagccacctaaggggctgcctcaaccttccattaatcacctcgcttcccagccagggaatcaagaaagtgtagcaggatgagccacagacaagaacccctcagacaccgaattgtagaaggaaagggctttattcagctgggagcataggcagactcacatctccaaaaacagagctccctgagcgagcaatttctgtcccttttaagggcttacaactctaagggggtcagtgtgagagggttgcgatcgattgatcaagcagggggtacatgactagtggctgcatgcacctgcaccggtaattagaatggaacagaacagtacatggtttttcacagtccttttccatacaatgtctgtaatctatagatagcataaccaattagttcaggggtctgtctttaacaactaggcccagggtttgacgccgggatgtctgcctgtgggtttcatttctgccttttagtttttacttctttttttctttggaggcagaaattgggcataagacaatatgagaggtggtctcctcccttactttgaccaacatctccccaacccatacccctaagcccctggtaactaccattctgtctctccttctatgaatccaactttttaaattatacatacaagggagatcatctggtatttgttttcccatacctggcttatttcacttaacatattgtcctccacatccatccatgatgttgcaaatgacaatgtttccttttaaaacatacaccacttttgaatgtgttttattcagtctacaaagtcacctatgagacattcagtggggtcacagaaggaaagtgctttgcaagccaggcgaggtgcctcatatttttaatcccagcactttgggaagccgaggtgggtggatcacctgaggttgggagttcaagagcagcctggccaacatggtgaaactccatctctactaaaaatacaaatattagctgggcatggtggtgcacacctgtaatcccagctacttgggaggctgaggcaggagaatcggttgaaccctggtgacagagggtgcagtgagctgagattgtgccattgcactccagcctgggcgacagagcaaaactccgtctcaaaaaacaaaacaaaacaaaaaacaaagcaaagcgccctgcatcaagttcaggctgctctataacattctcaagcacttcgtccaaatgatctagtagatccaatcatactcaatgcctccatagcattctctggcaagcaccaataggagacgcgcagcacagtagtgtggagcaaatccatgccatcttctgcaggaaactaccctctttttgagaaacaccttggctctggtactaggtagaaacaactgaccggtgatttttttttttttttttttttttgagacggagtctcgctctgtcacctaggctggagtgcagtggcgtgatctcggctcactgcaacctccgtctcctgggttgaagtgattctcctgcctcagcccttctgagtagctgggattacaggcgcacgcccccacgcctgactaattttttttttttttgtatttttagtagagacagggtttcaccacattggtcaggctggtctcaaactcctgacctcatgatccacccgccccagcctcccaaagtgttgggattacaggcgtgagccaccgtgcctggcctaacacgtgatcttaagattatgttagtgaagttgatccatatcactgtatctacctttattacttcatttgctgtagagcattccagtagtataattatgccacaatttacccattctgttgatctcatttgagtaattcccaattgaggattacatcaaataatgctggtgaaatgtctttaatgttatcttgatgcacactggagccattactcttatgttagagcacatgtacgtgtacaaatttagtagatgttgccaatagtttttgaaattttctctaatactctctacaaccagcagaatacgcacatcctcatcagctttatcttcagaacaaaccatttttttctctgtgtccagctagctcactgggacccctaagtgacaaatacagatggtaatgtatttctttttttttttttttttttgagacagagtcttgctctgtcgcccaggctgtagtgcagtggcacgatctcagctcactgcaacctccgcctcctgggttcaagcaattctctgcctcagcctccccagtagctgggattacaggcgcccacaaccatgcccagctaatctttgtatttttagtagacggggtttcaccattgtggccaggctggtcttgaactcctgacctcatgattcaccctcctcggcctcccaaagtgctgggattacaggcgtgagccaccgtgcccggcccaatgtgggtatttttaagcctcatgtttccttcagagctttctggcagcccatgtcagcaagagagtcttctgatttcatttacccatggagtgagtagatgtgtcggtgacataggagtctcacacgggactggtaactctgtacatttcttctgggaaatggagtcctactttgggtaggaagaacccaaagttgaactgaataccacggagagccttgcccctccatatatgaacacatatttgctaagattggtaattaagtgaattttcatgtagaacttattttcaagtgctcagccagccactgattctgattctttcaattaatttcctacttaagaaaattagtttttcatgagtagaataaagtgatgattagacatcattttttctgtagttataatgttgtagattagattcatccctcattttaatccccaaagaaaattctatcaaacctaagaaaaacccttgatgtactcacctctctccgtagatatgtaatcagccaatttatatgatgctttccttaactcctactccctttcctttcaatatggcttatttagacaccatctttttggtctcaccttaaatagaactcacttttcttacattcatctattcccatatatacacatagaaaacaatactgtcctctacttccaaaactctcatcaatttgtaataataagtcaagcgcagtggctcacccttgtaatcccagcactttgggaggctgaggcaggtggatcacctgaggtcaggagttcaagaccagccaggccaacaggatgaaacccccatctctagccaggcgtggtggcgcatgcctgtaatctcagctacttgggaggctgagacatgagacttgcttgaatctgagaggcggaggttgcagtgagcagagatggcacaactgcactccagcctgggcaacagagggagactctgtctcaatttaaaaaaaaaaattgtaatgaaacatttatttgcttggttagacgtctgcccctccactagtttacaagttccctaagagcagcccttggttggattttttttttttcattatgccttaatgaaccattagcattaatcactttataagaaatacaaaaaataaaagaaatatttaaacacaccataagtctacaatcagaaatattaaaatgggtgtctttctgaaataatatgtgactcttcaaaaagttgatttgacagagaaaccatagtaactggtctaggttcaaagatactaaaggccataaactttaaatagatcttaggtcccaagggcctattttggaaccatgtagagaattttgtttttacaaagtagatactagatgagtcgttcttttttttttttttttttttttttttgagacacagtctccttctgccacccaggctggaatgcagtggcgcgatctcggctcactgcaacctccacctcccgagttcatgtgattctcccgtctcagctggtgggatcaccggtgctggctttatttatttatttatagtagagatggggtttcgccatgttggccaggctggtctcgaactcctggcctcaagtgagccacccgcctcggccttccaaagtgctgggattacaggtgtgagccactgtgcccagcctaaatgactttttttaaatttttcttggttgaaatacaaatactgtggttttagtagaccagtatcctttatctttagaaaatgcattaccaactacctgaaagtcaagtatcaatttcctgcaattttcaacttaccctcaaatacttcaccataaaaggtattttagttttctagggagagggcgaatggtaaatttgattcctaatactagtgcaacaaaatctatatcctttcctcctgggtgcccatttttgtctttttgtttaagaggcaaggtcttgctctgtagcccaggctggagaacaatggcgtgatcatagctcactgtagtctggaactctctgtctcaagtgattctcccgcctcagccttccgagtagctggcacacaccaccatctctggctgatttttaattttttttttttttttttgtaaagacggggtctcgctatgttgcccagattggtcttgtaccccgggtacgagaccccgtaccccgggtgggcccctggtttgttcgtttgcttgggttttttgttgttgttgtttttgagacagagtctcggtctgtcaccccagctggagtgcagtggcacgatctcagctcactaacttcctcctcctggattcaagtgattctcctgcctaagcctcccaagtaattgggattacagacgtgcgccaccacgcctagctaatttttttgtacttttagtagagacgaggttttgccatgttggccaggctggtctcaaactcctgacctcaggtgatttgcctgcctcggtctccctaagtgctgggattacaggcgtgagccaccgcacctggccagcgcctgtttttaaaatctgtggggaggtccaggcctacgaagttcagatcaaaatagcttagcattcttatttttcttcagtagaaagacctgtttgtggtctacataattttatatttccgtagagaaatatgcactccctagatacttattaaagtgtctttataacagaatgtatggcgtcaaaaatacgtttatgacgcataaacaaaggaacattctcagttgaaacattcgttcgtataacaagatgcccccttgaaccatccctcacccagtgctcaccggaatgcgcgggaatcgcagggtctgtaaggcaggacgacgctgggggacaagttaacgtggctcaagtggaggaaattcttttcctcatagaaaaaactcacaatggtctttttggaggcttttgaagggagctccatgggtgagggcggcaattatcgaccccgactttcgcgaggactgacagcccgagcggcctcgcagacctacctgacgcgagcacagcaggccaagtatctctaagaaggcccctcggcagcttcggataaacttcaactctcaccacccgttccactaccagtacacttgctccctccgaaatcaaggacaaccatgggtaaacctcgctcaggctcgcggagccagtaccggaaaagagggtggcgcctcgcttgcgtcacttccgcttacagcctccagccaggagtggctctgctgctcgtgcttcagccttgctggaagacattacgtcgagaaattctagtttcctcccgcgtgggtgcagctgagacttgctgtggactcacagaggaagctggagtccccaggttcagagaacaaggttgaagttagtcaggcctgtggagggagctatgggccaggggcacgggcccacgctagaggaccaggaggaaggtgaggccaggcccagaggatgagcttgaggttagaatcaggcctgtgggccggactacgctgggggaggagccatgattgggggcggagcagaaggtgggtccaagcccagaacaccaggttgagatcagatccagtcctgtggatggtagaagggcagggaggaaggtggggcctggccccaagtaatcggcctgtgtgggcctcccaaagtggtgggattacaggcatgagccaccgcgccctggccccggactctcaattctataccattaatctgtagctctgtccctaagccagtgccacattgttttgattactgcaactttgtagtaagttttgaaatccagaaatgggagtccttcaactgtgttcctctttttcacaattgttttggctatttggtgttttttccatttctgtttgaagtttaggattcacttgtcaatttctgcccagaagccaatgtcaaaaaaataaataaaaataaataaataaataaaaaagcactggaaaaagcaagatcttcattaattttagtcacctgtaccagatttctctttctttctttctttttttttttttttttgagatggagtctcgctctgtcacccaggctggagtgcagtggcacaaacttggatcactgccacccccgccacccaggttcaagcaattctcctgcctcagactctagagtagctgggattacaggctcccaccaccctgcccggctaattttttttttggggtgggggacagagtttcactcttgttgcccagactggagcacaatggcatgatctcagctcactgcaaattccaactcccgggttcaagtgattctcttgccgcagcctcccaagtagcagggattgcaggcacctgccaccacgcccagctaatttttgtatttttagtagagacagggtttcaccaggttggccaggctggtcttgaactcctgacctcagaaaatccacctgcctcagcctcacaaagtgctgcgattaccggtgtgagcctcagatttttctttaggcatggaagtgtaggggtctacattaggagagagttaagagtgtaacagtatcatgggttaagcagagctcaggaggaaaaccaaaaaatattgtatccattttgtaccttaggaaaggccatccatgagcatcactgggtggagatttttgggtaagaggtgtatagtttctagcacaagggtcaaactcaactccgatggaaaattcttcgttggggcagtgtcttctgaggcaatgtcatctcagccagtgaaatttgggggccagagtgatatcatgatgtcatctgggatgtgggactggggaatcctttgttgttgttgttgttgttttgagatggagtctcactctattgcccaggctggagctcagtggtgggatctcagctcactgcaaactctgccttccaggttcaagctattccaatgcctcagcctcccaagtagctgggattagaggcacacactgctatgccaggataatttttgtgtttttagtagaggcagggttttgccatgttggccaggctggtcttgaactcctgtccttaagtgatccaccttccttggcctcccaaagtgcagggattacaggcatgagccatcaagcccagcctgaggaatcattttacgtgagtacccatttgagttaatagggacctcctgagtgtaaaccagtgaaagtacagaaactagtagtaataacaccaacagtaaacagaatggtgtgcaactgtgcctgacagtttttgtttttgggttttttttgtttttgtttttggtggaaatttagctgctttttgtttggagggttttttcgagacagggtctcactgtattacccaggttggagtgcagtcgtgcaatcatagctcactgcacccttgaatccctgggttcaagggatcctccctaagctactgagtagctggggctagaggcgaatgccaccatgtccaactcatttttcaatttttttgtagagatgggtctcattatgttgcttgggctggttttgaactcctggcttcaagcaatcctcctgcctcagcctcccaaagtgctgggattacaggtgtgagccaccgcacccggccaaaattaagtttaaatgggtcctgtggccaggcgcggtggctcacacctgtaatcccagcactttgggaggcgaaggtgggcagatcatgaggtcaggagttcgataccagcctcaccaacatggtgaaacctcgtctttacttaaaaaatacaaaagtgagccaggcgtgttggcacgcggctgtaatcccagctactcaggaggctgaggaaggagaatagcttgaacctgggaggaagaggttgcagtgagccgagatcacaccactgcactctagcctgggcaatagagagaggctctgtctcaaaaaaagatcataataataaaataaaataataaatgggtcccgttatcagatgatcagctggctggcctgtgggacaatctctgcttaatgagtccaaagaaagcatatacactcaatctggattctaatccctgagagatgggggcaaaattaaaaatttgttaagattggttaagatttggggcaaaatataaacttatgtaggggtttatttgttggactgcaatttgaaaaggagttgtttgaggacttcattacatccctcagttaaaatgtctatttggaacctgttagggacacaaaacgtctattgaatgcctttttcaagagcctagcgttctgtattttaagaagtgaaatgtgtgtcttggttactatcagtaatgcctgttactccaaagggaatgtggagtggccttgcagaggctggtattgcggcctcagtatacgtggcaatgtgttgttttgatttatattttcggtatcagtcaggcaagagatttccagactttttttttaccttatggggacaatatttaggtaatggctcagttgtgtataataaacatgatgatgggatcatatgtttgaccagggcatccagtgccaaaacagttgccaaaagtacggccaagcaaattgtttcttggatcctgtcctttaaaaaaagaaaattagccgggcgtggcggctcacgcctgtaatcccagcactttgggaggccgaggcgggtggatcatctgaggtcaggagttcaagaccagcctggccaacatggtgaaactctgtctctactaaaaatataaacattagctgggcgtggtggtaggcgcctgtaatcccagctactcagaaggctgagacaggagaatcgttttaacctgggaggcagaggttgcagtgaaccgagatagtgccactgcactccagactaggtgactcccatatatatatatgggagtttattaagtattaactcacaggatcacaaggtcccacaataggctgtctgcaggctgaggagcgaggagagccagtctgagttccaaaactgaagaacttgaagtctgatgttcgagggcaggaagcatcccgcatgggagaaagaggtaggctgggaggctaagccagtttctctcttcacatttttatgtctgcttatattctagcatctctggcagctgattagattgtgaccccccagattaggggtgggtctgcctttcccagcccattgactcaaatattaatctcctttggcaataccctcacagacacacccgggatcaatactttgtatccttaaatccaatcaagttgacactcagcattaaccatcacaccaatctacaagagcaaattatttatctgttgttgaatgaatagaatcagtaatctaaataatattggaaattgagtatggagaccctgatggatgggaccacaacattaagtcaataattagtccatcacgaagggccatttatcacttttattatttgttttgtttattttctagagacagggtctcactctgtttcccaggctagagtgaagtggcccagtgacagctacctgcagcctcaacctcctggactcaagtgaacctcccacctcagcctcccaagtagctgggactacaggcacacattaccatgctcagctaatttattctttttgtagagatggggtctcactatgatgctcatcttcccaccttggcctcccaaatctctgggattataggcataagccaccacagttcacccttgtttttaaatcagtaactaatctagggatagaattctgtttactagccttgatgtttctttagtacttacagtttcaagttactcatttccaccaccttggatttacagctgcctagagcagccagaagtctttttttctcccctcaaacctccccattttaggctttgagttgcctaaagccacagttctttgtgtttgttttggttggtttgagacagatccttgttctgtcacccaggctggaatgcagtggcacaatctcagctcactgcaacctccatctcccagaaagccacagttcttaaattccatctctggttgataagaggaaatgagggagcagtaaaggtccgatgcctataggcagtagcctcaagacaattggtccttttcttccccccaattttttattttacataaaatctttacaatggcttgtatttctaagtggctaaaaaaaattttttttttttggccaggcacagtggctcatgcctgtaatcccagcactttgggaggccaaggctggtggagcacttgaggtcaggaacttgagaccagcctaatcaacatggtgaaaccccctctctactaaatatataaaaattatccaggcatggtggcacatgcctgtaatcccacttactcggaaggctgaggcactagaatagcttgaattgggaggtggaggttgcagtgagccaagattgcaccatagcactccagcctgtgcaacaagagtgaaactccatctcaaaaaataacttttttcctcttattttggatgtttacttgacatactggttgcttggtccccactggctcctgttgtaagcagtggactccatttggttccctttggccccatggacaggcagtcacctccctccctctctctggtgtccccattgacctcattagggtcaggtgacaaagaactacataagccagtgaaggcaccaacatagagatcccagaccctggcagtacgtttgcctggaatgggatatgacttcctggggagggggcacccctcctactgaaggaaccctgtggggttttggcacatcaccaccaagagcgagggtctaacagaggccagtcttcaaactcccatgaggggttttgccaaatactgggtatatatatgcatgaagctggggttgcccctttcctgttccagaacttatgacatgaattgcaatcttgaacagcttagccaatttggttctgactcattcattggactaacagtgagtatagttctccctcttgctgtactagggctgggtttttagtctaggccaagtgataccagaacaggaaaaactggtattcttattgcccctttagtgttacttgtaatgtcctctgagctggccacaccatggtcaagccagcatgacattcacccgcccttgtgataatgtactttgtgatattccccaaccttgtgaatgtactttgtaaaattcctccccacccgtgtgacaatacaccctcccagcccttgtgaatgtactttgtgacatccttcccacccttgtgaatgtactttgtaacatcctccccgcccttaagaatgtactttgtaacaaccatcccttgcctgcaaaacaattgctcctaactccacagcctatcccaaacctataagaagcaatgataatcccaccacccttcgctgactcctttctcagactcagcccacttgcagccaagtgaataaacagccttgttactcacactaagcctgcttaggcagtctcttatatggtcgcacataacatttggtcccaaaaacccaggacaagggaactccttcaggagatgtgtcccctgtcctcaagctccctgcatgaggagatccacctatgacctcggggcatcagaccaaccagcccaaggaccatctcaccaatttcaaataaataagtggtttttggcacttgggtcagcagttttttcactcgctacttaacctctctcacctcccttcaatctctctttcaatttcagtttctctcctttcctggtagagacaaaaaggagacacactttatccgtgcattcaaaaactctgacattggtcacagacttgggaagatagtcttcccttggtgtctgatcaccgtggggacgcctgccttgatcattcaccaacattcccttggtggcaggtcaattgcagggatggctgctttggcagctcacccacattacagcctaggactcagtcagggatgcctactggaagactggtagctgcccacctccatttctccgtgtctctaccttcctctttaaacttaccttctccactatgcgcaaccttccatcatccattcttacctcttcccccttagcctgtgttcttaaaaacctaaaacccctttgactaacacctgacataaaagctaaatgtcttattttcttctgtaatattgcttggccccaatacaagctcgacaatagttccaagtggccagagaatggcactttcaatttgtctatcctacaagacctcagtaatttttgtcgaaaattgggcaaatgatctgaggtggcttacgtccaagcattttttacattttgctccctccctagtttctaccaccaatgcaactcatcccagattttccttcttttctctcctgtctgcttcttcggtcttcaccccaagctcagagtcctctgaatcctccttttccagtgacccctctgacctctctcctcccccagctgctcctcgccagggtgaatcaggtcccaattcttccacagcctctgctctcccaccctataacccttctattacctcccctcctcacacccagtctggcttatagtttcattctgtgactagctctcccccacctgcccaacaattttctcttagagaggtggccggagctgaaggcatagagtcagtacatgtgcctttttttctattagacctttcccaaatcagtcagcatttaggctctttctcataggaccccactaaatatatacaggaattccaatatctaactcagtcctacaacttaacctggagtgacttaaatgtcatcctgacctttaccccctccccagacaaacaagaaagagtttattttctagcccagtcctacacagacacccactggcttcatgagccaggcctccaagagggcaccagggctgttgcccgagagtatccccattggcaataccagacagactccccaggtatagctaggcgagattacatggtctcctgcctagtcgaggggctgaaaaaggcagcatacagcgctgttaattatgacaacctaaaggtaactacccaaggtaaagttgaaaacccagcccagttcattgcccgcttagcagctacccttagacactttacagcactagaccaagaggggccagaaggccaccttatccttaatatgcattttatcacccaacctgctcctgacattagaaaaaatctccaaatttggattctggccctcaaaccccacaacaggatttaatcaatctcaccttcaaggtgttcaataacagagaagaactggccaaacagcaacgtatctctgagttacagctacttgcctccactgtaagacaacccacaacatctccagcatacaaaaccttcagaacaaccaagacacagctcccaggggctccttcaaaacctcctggtggaccttgcttcaaatgccaaaagcctggtcactgggcctcggaaagcccgcagcccgggtttcctcctaagccatgccctctctctgtgggcccccactggaagttggactgtccgactcacatcgccaccattcctaaagctcctggagctcgaacccaactttccttggcagactccttcccagatctcctcgacttagtggctgaagactgatgctgcccaatcaccttggaagcccccaagaccatcatggatgctgagctttgggtaactcttacagtggagggtaagtccatcccgtttaattgatatgggggctacccacacaacactactttcttttcaagggcctgtttcccttgcccccgtaactgttgtggttattgatggccaggcttccagaccccttaaaactccccaactcttgtgccaacttggacaacattcttttatgcactcttttttagttatccccacctgcccagttcccttattaggctgagacattttaatcaaattatctgcttccctgactatttctggacctcagtcacacctcattgctgcccttttgccccattcaagacctcttttgaatcctcctttcgtgtcttcctaccttaatcctcaagtgtgggatacttctactccctccttggcgactgatcaggcaccatttaccatcccattaaaacctaatcacccttacctcactcaacaccagtaccccatcccacaataggctttaagaggactaaagcctgttatcactcacctgttacagcatggccttttaaagcctacaaattctccttacaactcccctatcatacgtgtccagaaactggacaaatcttacaggttggttcaggatctttgttttattaaccaaattcatcctgtagtgccaaacacatgtactctcctatactcaatacctccctccacaacttattattccatccttgacctcaaagatgcctcttcactattcctttgcacccctcatcccaatctcctttcactttcacatggactgaccgtgacacccaccaatctcagcaactcacctggactgtactgctgcaaggcttcagagataacccccattactttagttaagctctttctcatgatctactttctttctgtccatctgtttttcaccttattcaatatatggatgaccttctcctctgcaactcctcttacgaatcttcccaacaggataccctcctgctccttcaacatctattctcaaaggagtatcacgtatccccatctgaagcccaatttctttcccatctgttacctatcttggcatagtccttcatcaaaacacacgtggtctccctgataaccatgtctggctaatctccgaaaccccaaccccttctgcaaagcaacaactcctgtccttcctaggcatggttggatacctttgcctttggataccaggttttgccatcctaactaaacccctatataaactcacaaagggaaacctgactgaccccacaaaccctaagttctttccccactcttcttttcattccttaaagacagtcctagaaacaggtcccacattagcactccctaatttgtcccaatccttcttatatacggctgaaatacaaggctgtgtggttggagttcttacacaggaaccaggcccacgacctgtagccttcctatccaaacaacttaacttcaaagttctaggctggccctcatgtctatgtgtggtggcagctgctgtttcaatacttctagaggccctcaagatcataaaccatgccccacttactctctacagctctcataactttcaaaatctattttcctcctcacacttggcgcatatactttctgcctccagactcctccaactctacttactattcattgaaactctcacagttaccattgttcctggcacagacttcaacccagctgttcaccttatacctagcaccaaacctgaacctcatgactgtatctctcaatccatatggcatcctccacatttccccatatttccctctttcctgttcctaatccagaccacacgtggtttattgatggtagttcttcaaggccaaatcgtcagtcaccggcaagggcaggatatgttgtggtgtcttccacatcggtcactgaagctactgccctgcacccttccattacctctcaacaagccgaactcattgctttaacccaagatctcacccttgtaaagggactatgtgtcaatatctacactgattccaagtatgccttccacatcgtacattaccatgcagttatatgggcagaaagaggttttctcactacacaagggtcctccatcatcaatgcttccttaataaaaatcctccttaaggctgctctactgcccaaggaagccagtcattcactgcaaggggcctcagaggttaccagatcccattgctcgaggcaacgcttatgctgataatgcagcaaaagcagcagctagtattcccacatctgtccctcatggccattttttttccttctcatctatcacttccacctattctcccactgaaactattacctatcaatcccttcctactcaaggcaaatggttcttggatcaaggaaaattcctccttcctgcttgacaggctcattctatcttatcaccctttcataacctcttccatgtgggttacaagccaatggcccatctcttagaacctctcatttcttttccatcatggaaatccatcctcaaggaaattacttctcggtgttccatctgctactctaccacccctcagggatatctcaggccccctccctttcctacacaaaaagctcgaggatttgcccccgacccaagactatcagattgactttacccataggccccaagtcaaaaaactaagataccttttggtctgggtagatacattcactggatggatagaggcctttcccacaaggtctgagaaggccaccacagtcatttcttccctcctgtcagatataattccttggtttggccttgccacctctatacagtccaataacggaccagccttcgttagtcagatcactcaagcagtctcccaggcccttggcatccagtggaagcttcatgcccctactgtcctcaatatttgggaaaggtagaaagaactaacagtcttattattattattattattattattattattattattattgttacattaggttctagggtacatgtgcacaacgtgcaggtttgttacatatgtatacatgtgccatgttggtttgctgcacccgtcaactcgtcatttacattaggtatgtctcctaatgctatccctcccccctccccccagcaggccccagtgtgtgatgttccccaccctgtgtccatgtgttctcattgttcaattcccacctatgagtgagaacatgtcttgtttggttttctgtccttgcgatagtttgctcagaatggtggtttccagcttcatccatgtccctataaaggagaagaactcatccttttttatggctgcatagtattccatggatcatatgtgccacattttcttaatccagtctatcactgatggacgtttgggttggttccaagtctttgctattgtgaatagtgctgcaataaacatacgtgtgcatgtgtctttatagcagcatgatttataatcctttgggtatatgcccagtaatgggatggctgggtcaaatggtatttctagttctagatccttgaggaattgccacactgtcttccacaatggttgaactagtttacactcccaccaacagtgtaaaagcggtcctatttctccacatcccctccagcacctgttgtttcctgactttttaatgatcaccattctaactggtgtgagatggtatctcattgtggttttgatttgcatttctctgatagccagtgatgataagcatttttccatgtgtctgttggctgcacaaatatctccttttgagaagtgtctgttcatatccttcacccactttttgatggggttgtttgattttttcttgtaaatttgtttaagttctttgtagattctggatattagccctttgtcagatgggtagattgtaaaaattttctcccattctgtaggttgcctgttcactctgatggtagtttcgtttgctgtgcagaagctctttagtttaattagattgcatttgtcaattttggcttttgttgccattgctttcagtgttttagtcatgaagtcctagcccatgcctatgtcctgaatggtattgcctaggttttcttctagggtttttatggttttaggactaatatttaagtctttaatccatctcgaactgatttttgtataaggtgtaaggaagggatccagtttcagctttctacatatggctagccagtttaactggcaacatttattaaatagggaatcctttccccatttcttgtttttgtcaggtttgtcaaagatcagatggttgtagatgtgtggtattatttccaagggctctattttgttccattggtctatatctctgttttggtagaactaatggtcttttaaaaacatacctcaccaagctcagccttcaacttaaaaaagactggacagtacttttaccgtttgccctccttagaattacagcttgtcctcgagaagctacagggtatagtctatttgactatatggacataccttcttgctgggcccccaccttgtgccagacaccagccctctaggcgactatcttccagtcctccagcaggctagacaggaaattcaccagcctgctaatcttctcttgcctactccagattcccagccatatgaagacaccctagctggatgatcagttgttgttaagaatctgatccctcaaactctacaaccgcgatggactgcttagtcatctatagtaccccaactcccgtccacctgcaggaccctccccattgggttcaccattccagaataaagctgtgtctgtcagccagccagcctgatctctcttcttcctcctggaagtctcaagcactctcccctacttcccttaaactcactcgcatttctgaagaacagtaatagcccttataaacctaacacatcccttcattctattaggtctattcgtccttaccctactttttgcaacagggctttatgaagtcatccccactacttggactgtgcccccaagacttgtcatccctattatcttctgtctagtcatacacctattcatcattctcaactactcgtaaatgccctgcccttgtttacgctgccagtttaccagtttacacttttcctccaagtcaccataactgatatctcctggttttacttcaaatagccacccttaactctcttgcagtggatataatatcttcagtggcaagatacattccaattctcctatcctgataagtctttctttttttttttttttttttttacttttctactcactcttatccttgcccctattctccagtcactctctacctctccctagttacctccagcatagtatcaacctcacccactctctcctcactgcctccaatccttctctagtaaaaaattgttggctatgcatttccctttcttcctgctcttatgcagccgtccccgctctacaggctgactgagctacctctcctgtctccctacacctctgaaccttctttaatagcccttgtctttacccacctgaggaacttctttactttctagacagatttggtgagaactccccagagatttcgcattaaaaagcggccacacttctccgcatctacttacggcacctttctctttatgtcaattccactcccccccatatttggacccctaaccacacaaacaactatccctgttgctgctcctttatgcttctcccaaaaacagcctactggaatccctttaggaaaccttccaccatccaaatgttcctttactctttatctccagaaccaagccacacacactaccaaacagatgggagcattccaacttcacattactgataagctctctatcattactgacaaactaaaaaacattggcagtcactaatgcttaggaagacacctaccctgcatctcactccatctttggctaccctcgccctgctcatttgactctcctcctgacccctcctcttgcttgcttatacccagccccatgaatagtagtgaaagactactcacagatactatgtgctttcttatacaccatgagaactgaaccttccctctacgcagttgcaccatcaatccccattacaacctctaatggctgctgcctttgctggatctctaggattttgggtgcaggacccctctttcactacaccctctcaccttttcactttacatttccagttatgcctgacacaagctctcttatttttctgtggttcttccacgtacacctgccaactggatgggcacatgtactctagtcttccttacccccaaaatccagtttgcaaatgggaacgaacaactgcctgtccccctcatgacaccaacatgacaaaaaagagtcatcccattaatccctttacttgtgggtctaggaatttctgccttcactattgcacttagaactggaatagcagctatctcaacctctgtcacaccattctgcagcctctctaatgacttctctgtttagcattacagatatatcacaatctttatctgtcctccaagcccaggttgacactttagctgcagttgtcctccagaactgccaaggcctcgatttactcactgctgaaaaaggaggactctgcatatttcttaatgaagagtgtttgtttaactttaatcagtctggcctggtatatgatgacgtcaaaaaactcaaaaacagagctcaaaacctcgctagtcaggcaactaattatgctggacccacctggccactctctaactgggtatcctggcttcttccaatcgttagttctctaatacctgtcttcctccttctcttattgagggcttgtgtcttctgattaatctctcaattcctacaaaactgcatccaggctatcactaatcactctatacaacaaatgctgcttttaacaaacccacaatatcaccccttaccccaaaatcttacttcagtctaatctctcccactttaggttcccacaccaccgctaatcctgctcaaagcagccctgagaaacgtcacccatcactcctccatacagccccaaaatttcaccccaagttttcactattcttattttatttattatttttatttcttattaacataaaaaaacaggaatgtaaggtcctctgagctggccgcaccatggtcaaaccattgtgacatccccggcccttgtgataatgtactttgtgatattccttgtcctgtgaatgtacattgtaacattcctccccacccttgtgaatgtaatttgcaacaccctccctgctcttctgaatgtactttgtaacattcctcccatcccttgtgacaatacaccctccgcgcccttgtgaatgtactttgtaacatcctccccgcccttgtgaatgcactttgtaacattcctccctgcctttgggacaagacatcctccccgcccttgtgaatgtactttgtaacatcctccccactcttgagaatgtacttcataacatccatcccctgcccacaaaaaaagtcgctcctaactccaccgcctatcccaaacctataagaccaatgataatcccaccatcttcactgactcctttctcaaactcagcccacttgtaccctagtgaataaacagccttgttgctcacactaagcctgctcaggtggtctcttatatggatgcatgtaacattactgtaaaatgagatcttgcggggtgcagtggctcatgcctgtaatcccagcacttcggaggccgaggtgggtggatcacctcccaaagtgctgggattacatgcatgagtcaccatgaccagccaggtatttctttataacaactcaagaacagactaatacacgtgactatttccagactattttgtaccaatagtctagttgtctgtgtacaatgcaacagcatcttaattactatagttttaatcttgatattcattagggcaagttcttccaccttttttatcagctgggtcttgattatccttgcctattgttcttccatataccttttagaaacagtatttcaagggcgggtgtggtggctcacgtccataatcccagcactttgggaggccaaggtgggtggatcacctgaagtcaggagtttgacaccagcctggacaacatgatgaaacttcgtctctacaaaaaaaaaaaatacacaaaattagctgagcttggtggtgcatgcctgtgatcccagctactcgggaggctgaagcaggagaatcacttgaacctgggaggtggaggttgcagtgagtggagattgttccactgcattccagcctggggaacaaagtgagacttcatcccaaaaaaaaaaaaaaaaaaaaattcttattgcttctttcagtgatttcccttttttttttttctattctctcattctagaatgccttgtagctggatattgaagctttttgcttatctcatacattatttaatttacatcctttccagcacttttctttttaggctgaattctgtgaaacattccttggcttagtctttgagatctttcttctttttgaatttgagtagttactgctatgagttgccttcttttcactactttcactgtatctgtccattcaggctgctataacaaaataccatagactggtggttaataaacaacataaatttatttctccgagttctggagattaggtcaaagctcaaggtacagtcagattcagtgtcagatgagggcccttttcctggttcacagagagccatcttcttgaagtaaccaaatacagtagaagtggcatgaaatatctttggggtgtcttccatgaggggggtaatcccattctgcagagccctcatgacttcatcatgtcccaaaattcccagctcctaatacaatcactttgggagttaagatgtcaacatacgcaagttgaggagacaaaatttatttatttatttatttatttatttatttatttatttatttatttttgacatggagtctcactctgtcacccaggctggaatgcagtggtgtgatcttggctcactgcaagctctgcctcccaggttcacaccattctcctgcctcagcctcctggataactgggactacaggcacccagcaccacactgggctgattttttttttttttttaagtagagacagggtttcaccaccttagccaggatggtctcaatctcctgaccttgtgatccacccaccttggcctcccaaagtgctgggattacaggtgtgagccaccgtgcccagcctaggagacaaaatttagactacagcaacatctcataaattttggtatgccatgtctttgttttcatttgtctcaagatgttttctaatttaccttgtgaattcttgcttcacccattgatagatcaggagtgtgttgcttacaataaaatgtatttgtgaattttccagttttccttgtttttcatttcttgtttcattctatgtgacttgaaatggtactttgtgtttcagtcttttacatttcattaagatttgttttgtggcctaacacatggtttctcctggaaactattccacatatgcttgagaaaaatgtgttctcttctgttgtggggtgggttgtgccaactgttatatagtacttgtcctgtttccttcttgatattatcgtggctgttctacctattaaattgaaagtggtataatgaggtctccaattgttatgcagaattgtctatttttccctttaattttgccaatatttacttcatgtattttaagctctgatgtttgatacatataatttttttatcttcttgatgaattttaccttctatcagtatatactctcattcactctctcttctatcagttttttacttcaagtttactttgtctgatattaatatatccaggcaaattctctttaggttactatttacatggaatgatctttttccattatttaactttcaaccttttttgtctttagatctaaagcgaaggatggccaggcgtgatggctcatgcctgtaatcctagcactttgggaggctgaggtgagcagatcacctgaagtcaggagtttgagacagcctggtcaacatggcaaaaccctgtctctactaatactacaaaaattagctgggcatggtggtgggtgcctgtaatcctatctactcaggaggctgaggcagagagaatttctggaagccaggaggtgaaggttgcagtgagccgggatcttgccattgcactccagcctgggcgacagagcgagactctgtcttaaaaaaaaaaaaaaaaaaaaaaagcaaagggcaacatacagttggattgtgtattttaatccattttgccaaattatgccattagattggagaagttatcccatttacccttcatataattaccaataaaaaagactcattttgccactttgttactctttttctgtatgtcttacagctttttggtccctcatttcctacattactgccttttttgttgatttgtttttttagtgacatctttttttcgtctcattttgtgtatattccattgatattttatatgtagttaccatggggatttttttttctttttttgagatggagtatcactcttgttgcccaggctggagtccaatggtgcgatttcgagtcactgcaacctccacctcccaggttcaagcaatcctcctgcctcagcctctcaagtagctgggactacaggcatgcaccaccacacccagctaatttttgtatttttagtagagacggggtttcaccatgttagccaggctggtttcaatctcttgaccttgtgatccacacacctcagcctcccaaagtgctggaattagaagcatggcctggtgaccacggggattaaatataacatcctaacatccactgtacagtccactgtccagtcctcactcctcccacatgctgttcttactaaaatatagaaaaaattctactagggggaattttaaaagcaattaaacttttcaaccacagaaaatttactgtccatgacaagtcgtcatggacagtaagacacatagaaaggcaatctcattttcatgtcatttatttcaatttctcctctagtatgatcttgtgtacagtaacagtagtatctgaaagcttcccataactcctcagattcatagtttattcttccagtgagtattttcagaggcacttaaggaatatgtactgctaaaagtattaccaggccgggcgcggtggctcacgcctgtaatcccagcactttgggaggccgaagcgggcggatcacaaggtcaggagatcgagaccatcccggctaaaacggtgaaaccccgtctctactaaaaatacaaaaaattagccgggcgtagtggcgggcgcctgtagtcccagctacttgggaggctgaggcaggagaatggcgtgaacccgggaggcggagcttgcagtgagccgagatcccgccactgcactccagcctgggcgacagagcgagactccgtctcaaaaaaaaaaaaaaaaaaaaaaaaaaaaaaaaaagtattaccagattttttttttttttgagatggagttttgctctgtcacccaggctggagtgtagtggcaaaatcttggctcactgcaacctctgtctcctgggttcacacaattctcctgcctcagcctcccaagcaattgggattaaaggcacccgccaccatacttggctaatttttgtatttttagtagagatgaggtttaaccatgttggcaggctggtctcaaactcctgacctcaaatgatctgcccacctcggcctcctaaagtgctgggattacaagcatgagtcaccacgcccagcatattctcatattttcacattcatatagcttgtttgcagtgtgggttttcacaagtatagtaagacttgtaaaatggatgcaacatttccctcattctgtattatcaagatttctctccagtatgaattatcatttatattaaaggatgaaataatacatacgtgtgtgtatgtgtgtgtgcatatatatgtgtgtgtgtgtgtgtgtatatatatatatatatatatatatatatatatatatataaagacattcccatatttctaacattcataatgtttctggcctctttgagattaccaaatattaacacatgagacagaagtaaagatttcccacatcttaccttcatagagtttctctccaacgcatgttgactgacttagtaacactggaagaattcttaacacatcttaaattgatgaggtttcttatatctgaaactgtcagaaatttctgaaggctgtcccagatttcttacatatataggctatctgcccactgtgagttctttgatgttgagttattaaaaggcataagtgaagatcttgtagcctttacatttgtagggttttataccactgtgaattctcatgtagatattaagtcctgagcactaagtaaatgttttatcacattccttacatacagagggtttttctccagtgttgattatgaagtactatgaaggtttgtgaagtattttaaggctatctctcattcttaccttcaattggcttttacagtaatttttgttatgaaaaataaacaatatgctgggtgtggtggctcaagcctgtaatcccagtactttggaaggccaaggcgggcagatcatgagatcgggagatcgagaccatcctggctaacatggtgaaaccctgtctctactaaaaatacaaaaaattagctgggcatggtggcacatgcccgtagtcccagctactcgggaggctgaggtgggagaattccttgaacccaggaggcagaggttgcagtgggccaaggtcatgccactgtactccagcctgggtgagagagagagactctgtctcaaaaaaaaaaaagaaaaataaacaatagtggaagaaacaaaggctttaccacatgccttagaaccagatttttctcccaaaggtgagttcttacactttataagatgtgaagaattactactcttgcctattccttatatcactgggacttgtgtccatgttaaattcattcctattatataagatatggaaattcagtgaaggttgttcatattctttaccttcctatgatttttttccagatgagtttagatgtaaatactaagatctgaggaacacttcaggttttttcacatgccttagttcttagatgtttagcaagtgctgaagattgagtgaagtttttcccacatttcttacattcatatggttttgctccagtgtgagttcgtgtgtgaacgttaaggtatgtggaatacctgaaggctttcccacattctttacatgcataaggcttttctcctgtgtgcgttcgcatgtgcatattaagatttgtggaacgagcaaatgctttaccgcattccttacattcacaggccttttctccagtgtgagttcttaaatgggtactaaggcccgaggattgagtgaaagctttcccacattctttgcattcatatggcttctctccagtgtgaatccttacatgttgactaagcattgaggaattattaaaggctttcccacattctttacattcatagggcttttctccagtatgtgttctcatgtgtaaaacaagtcctgaggaacgagtaaaagctttcccacatgccttacataaatacagcttctctccactgtgaatccttacatgttttgtaaggtatgaggaatgaataaaagcttttccacactccttacattcatatggcttttctccagtgtgaattcgcatgtgtaaaataagtcctgtggatctagtgaaggcttttccacattccatacatacatagggcttctttccactgtggattcttgtatgatcagtaaggtatgaagaatgggtgaaggctttcccacactctttacatttatatggtttttctccactgtgagttctgatgtgtaatttaagtcctgtggattgagtgaaagctttaccacattctttacagacatagggcttctctccactgtgaattcttccatgtcctataaggtgtgaggaattactgaaggctttcccacattccttacatacatagtgtttgtctccattgtgagatcttatatgtaacttaagggatgactgattaagaaaagttctccaacagtctttgcattcacacaatttctcttgtgtgtgagttttattctgcctagtaagatttggaaactggttgaaggctttttcatgtttaacacacttaggcattttcccctcagcatgacttttcttgtaaaaactatgaggaaagttctttcttaaggcttttccactctgattatcctcagaagttttctctccaatgtgagttatcatgtgagtcataagaaatgggtgttcattgaagacttttccagaatggttagagtcatacagtttctctgcagtattgcttctctcctgttgagatataaaagatgaataaagaatttctcacattcagtatggtaacagaatttctccccaatcacaacatatatgcattggaaatatatttaaacattttaacatatccattatatgtacagagttccagccccatttttgagttaagttgagtaataggacaatgaggccaccagcctgcctatattctctgcattcacagagcttcttagacaatctgtctgatatttatttatttatttatttaagaaagattctcactctgtcacccaggctgaagtgcagtggcacgatcttgactcacagcaatctctgcctcccagttcaagggattctcaggcctcagcctcccaagtagctaggattacaggcatgtgccactatgcccagctaatttttgtatttttagtaaacacagatttttgccatgttgaccaggctagtctccaactcctggcctcaagtgatctgcccgctttggcctcccaaagtgctgggattacaggcattagccacaatacatctgagaattatttagactaaattatgggctgggcacagtggctcatgactgtaatcccagcactttgggaggccaaggcaggtggattgctttgagctcaggagtttgagaccagcctggacaaaatggtgaaaccccatctctacaaaaaaaaaaataatcagccaggcatggtggctcatgcctgtagtctcagctattcaggaggctgaggctggaggatcatttgagcccaggaaacagaggttgcagtgagccaagactgcaccattgcacaccagcctgagcaacagagtaagaccttgtctcaaaaataataataaagtaaaagaaattatgcacaaaaaactgaatagctgagttgtatgtttgtggatgtttatttgtgagatctctgagaagaaatatgtttgtagtaagtttagagtgcttcccatattcatgatattcagagaatctcttcagactttgttttctctgggtaaatgccattttcctcatataattttcatgaatattgtgcttcttgtcctagtgtggaagatttcatcccttggaaatcttaccaattgtactccatttggtgatctttctgcagaaatatcttgcagcagtggggagcctttggttttgagttgcaaatccaattctgaaataaagtgaaaaatgcagcttgggagaaaaattgtggaataaagtcgtttaaaagcctatggggctgggcgtggtggctcacacctgtaatcctagcacttttggaggcctagataggtggcttacctgaggttaggagttcaagaccagcctggccaacatggtgaaacactgtctctactaaaaatacaaaaaattagccaggtgcagtggtgcatgcctgtaatcccagctactcaggaggctgaggcaggagaatcacttgaacccagagggtggaggttgcggtgaggtgagatccaccactgcactccagcctgggctacagagcaagacttcgtctcaaaaaaaaaaaatgcctaaggaacagacatagcataatcaaatgtggcagagtgaagaactacagggctctttcctaccacaatatgactaataagttcagaaaacctatcagaatcaactgtgctgggctgggtgtggtggttcatgcctataatcccagcactttgggaggtcaaggtaggtggatcacttgagttcaggagttcgagaccagcccggccaacatggtgaagtgctgtctctactaaaaatacaaaaattggccagacatggtggtgtacacctgtaatcccagctactcaagtggctgagtcatgagaatcacttgaaaccaggaggcagaggttgcagtgagtcaagatcatgccattgcactccagcctgggtgacagagtgagactctgtgtcaaaaaagaaaaaaatatatatatacatatatatatagctaagtgaaagaagctagagagaaaaggttacattgtatgattccatttatataagatatacagaaagggtaaatccgtagagagagaaagcaaattagtctctgtagggtgagtggggactgactacttgatgggtatatggtttccttttggtgtgatggtaatgctttgaaactagaccaagcacactggctcatgcctgtaatcccaacactttgggagacggaggcaggtgggtcacttgaggtcaggagtttgagaccagcctggccaacatggtgaaactccatctctatcaaaaaacacaaaaattcaccaggcatggtggcgcacgcctgtagtcccaactactcagaaggctgaggcaggagaatcacttgaagccaggaagctgatggaggttgcagtgagccaagatggctccactggactctatcctgggcaacagagagagactctgtctcaaacaaacaaacaaacaaagaaatgccttgaaactaaaaagagctgatagctacacaacactaaaatggtaaatttttgtatattttacctaaaaaaagtatatggcacatttgtatatctttccaaacatgcataaaacatgattaaaaaaaaaaagagtgaagcaaatggaaagatggactataaagagtttggctatgtcagaagttttgcaatggtaaagatatggtgtcaaaactatcactacacctgtaatgccagcactttgggaggctgaggcaggtgaatcacaaggtcaggagttcgagaacagcctggccaacatagtgaaatcccatctctacaaaaatacaaaaaattagttgggcgtggtgtcaggtgcctgtaatcttagctacttgggaggctgaggcaggagaattgcttgaacccaggaggtggaggttgcagcaagccaagatcatgtcactgcacaccagccagggcgacagtgcaagactccatctcaaaaaaaaaaaaaacctgtattacttattatccaactaataatatgcagaaaactgaggctggtagtaagcaaaaagatgggagaatcaagaaagcaatataagaaggtgttggcaaaggacctacatgcataagatggaattttcaaataaggcagacaaacctttctgagaacagaaaagaggttgagaagatcaatggaaatttaaagatgaggggagttgaaagtatctaaggaaaccaaatggcctcagccttctcaggaagaagagtataccctgagaagttcgcaaagtaacatttccaatgtactgcatgtctcctagggtggcacagcagtgccataataccacatctgcttatgaactcaccctgcagaactcctgtcactcctgtcctcagctcttccatttgttccaatccagacatgagactacgtttgaataattcagaccctgctggagggaaaaatgcacaaaagaagaggcccatgcaagacataacaccatgtccttcaatggggaaccaatacttttgccttcggggattctaaagatggtcaagtgtaactttacaaatagcaaactaatcatataacatttccaatacatgcactaaaactatttttaaaataacaaaaatgttgcccaggtataatggctcatgcctcatacctcagcactttgggaagccaaggcagggagatcacttgaggttaggagttcaagaccagcctggccaacgtggtgaaacttcctctctactaaaaatacaaaaattagcagggcatgctggcacaggtctgtggtcccagctactcagaaggttgaggcagaagaattgcttgagcctggaaaaccaagtccaacttcatacacatttaaagtcttaaagtttttaatccatacattaaataaactcatttacttaaatctttattttcatggggaatcctctacaccaggggtgtccaatcttttggcttccgtgggccacactggaagaagaagaatggccttggaccacatataaaatacactaacactaacgatcgctgatgagctacaacaaataaacaaaaaaactggtctgtgcataaatctcataatgctttaagaaagtttacaagcttgttctataaagtaatgcccaggccatgcatggtggctcacgcctgtaatcctagcactttgggaggccaaagcaggtggatcacctgaggtcagagtttgagaccagcctggccaacatggtgaaaccctgtctccactaaaaatacaaaaattagatggccatggtggtgcacacctgtaatcccagctacctgggaggctgaggcaggagaatcacttgaatccaggagggggggctttgcagtaagcagagaccatgccactgcactccagcctgggcaatagagccagactgtgtctcaaaaaaaaaaaaaaaggaatgtccactggccaaggtccatgcctgtcttgcttattacagtaccctcatttgacagcaaacatttaagaaacattgatttcctaaaggggtcagtgaagaaatgatgccagttttacctagtataatgagattcttgtagttctccaacatcacatctctgtagagatctctctgggcttgatccaacaaagtccactcctcctgggtaaagtccacagccacatcctcaaaggtcactaagtgctaaaccattaaatacatgccagcttcagctaagtaccatctcctttgatgttctgagaaaaatgcatgaaggactaaggaagactagaagcctgcagtactcccaggcctcaggcctcttctcctctatatagatattgtcttgcaatggcatccaatcccatggacttatcagcatcactgaaacatgactaaactgatcttcctacagctttacaatgggctcttctggccttagtcctcctctatttataggtgcagtctgcactgaatatgttgcagcactatgtaaaatctaataacaaatgaattatctccacagtgacacacaaattccttcagattagacatctccatccctttcttacaatctgtcataacactcagcaaaacaatgagccaacaagcatgattgaggatcagaaagaattagtaaacattgagataaaataatcatttctgtagggagacccactgaaactattgctacagaataaaagatgaaatgctcctgattactgtaaatacaaaattgcatgcaggattgtgtaaagacaatgccaggttggactgccagaatgagccaacagcgtgtgatgtgcttccccctgcacagagcctatgaatggacgtgcagtcagggaggtttcacatcaccaagattcctatcccagaaaagcagatgttcatagctctgggaatggaatgcgacccttgtggagagcctataaacagatgcatggggggtgcctgtccatatggataaacgccctcatcttgtcacggctcttgtaggcctctttaaagttaaggcatactcccttctgagaacttctggtctaaccagttgtctagcttcacatcctgtttccatggattgtttctaaccagcatttgtggcaattgttactgctgattaatatcttgctaatcataggttatggaaagattgtgtttctgttttaaggctctgttagaaattactgacacacacactatattttaaattcttgtctctgtatactgtacttctacatacaaatgtactgtacttctacatacaaatgttatgttaaagaattacttcatccccatgtgaccatctcacctcataatcaaatgaccctaaatccctcactaacctacccccgccctcactaagcttaataataactgctggtatatccagtgcattgttggcactgtgggaccagaaggcggtgacccccctggacccagccttcactatcttgtgtgtgtctattatttctcaacctgccaatctgcctgggaacaaagagagagccccgttgcactgtgggctgctggccagatcccgcaatacacttccattgcaatctctgtacaacctgagatggcttggttcctagagaaattcacctggggagttatttcctgagcaggaccatcatttctttaagatgcttgaatacacgataacaaggtaaggctaccgatgatggctacaagcataacattttgaagttaggtctgctttccacttgcctgagaagaatccatcagtaatccatcagtaacccagccactagccttggcttctcgatgttcctgtcatgaagacagaaagtgtcctggaaaaaatgacctttggaaaagaataatggcatgtcagttggatacatcaaagaaaaagtatttcaggctaggcatggtggctcatgcctgtaatcccagcactttgggaggccaaggtaggcgaatcacttgaggtcaggagtttgagaccagcctggccaacagggtgaaaccctgtctctactaaaaatccaaaaaaaccagccaggtgtggtggtgcatgcctgtaatcctagctactcgggaggccgaggtgggggaatcacttgaacctgggaggtggagattgcggtgagccgacaccatgccactgcactccagcctggctgacagagtgcgactccatcttaaaaaacaaaaaagtaggccaggcacggtggctgacacctgtaatcccagcactttgggaggccgaggcgggtggatcacgaggttaggagatcgagaccatcctggctaacacagtgaaaccccgtctctactaaagctacaaaaaaattagctgggcatggcggcgtgtgcctgtagtcccagcagctggggaggctgaggaaacagaatagcatgaacccaggtggcagagtttgcagtgagccgagattgcaccactgcactccagcctgggtgacagagcaagactccatctcaaaacaaacaaacaaacaaacaaataaagcatttccataccctgcattgcagacatagtcttttccatggcatgcctcccaattgtaatactattctgacacttaatactctaattgtccagggggtggctcatgcctgtaatcctaaccctttgggaggttgaagtagaaggatgcttgaggccaggagttagagaccatcctgggcaatatagtgagaccaagtctctttattaaataaataaataaacaaataaatatacatatatatatatacacatatatgaaaacaaagaataaaagaaaaaatactctagttgactttgcctagcaactatcagacagtaagaatacttttgtgtctggcttctttcagtcagcattatgctggtgaggtgcacccaagttgttgtgttcatccacctgtgatttggttcatatctttgctgaagaatatgccacagaggctgggcatggtggctcacgcctgtaatcccggcactttgggaggccgaggtgggcagatcgcttgaggtcagcagttcaagatcagcctggtcaacatggtgaaaccccatctctactaaaaatacaaagaaaaatgggtggctcacacctgtaatcccagctactcgggaggctaaggcaagagaatcacttgaaccaggaagacagaaattacagtgagccaagattgcgccactgcactccagcctggtgacagagcaagactctgtcacaaaaaaaaaaaaaaaaagccacagaaatatgccacaattcacccattctgtggatccacatttgggttgttcctaatttaggctatttcaaataatgtgataaataacttttacatttagcctggcacacgtatgcatgttgcatcaccaagtccatatttagttgtcactgttttaaaatgtagctgggcatggtggctcacgcctgtaatcccagcactttgggaggccgaggtgagtggatcacaaggtcaagagatggagaccatcctggccaacatggtgaaacccatcctggccaacatggtgaaaccccatctctactaaaaatacaaaaattagctgggcatggtggcatgcacctgtagttccagctactcgggaggccaaggcaggagaagcacttgaacccgggaggtggaggttgcagtgagccgagatcatgccactgcactccagcctggcaacagagcaagactctgtctcaaaaaaaaaaaaaaaaaagtgttctcttcagcaatgcatgcacatcttaaagaagacttgatattgtcactgactttagttatgcttttatttatttatttttttttttgtagagatggggtctcactatgttgtcccagcttgtctcaaactcatagcttcagtggctcctcctgcttctgcttcccaaagtgctgggattacaggggtgagccactgtgcccggcctagttttatttatttatttatttatttagacggtgttttgctcttgttgcccaggctgtagtgcattgccacgatctcagctcaccacaacctctgcctcccgggttcaagcgattctcctgcctcagcctcccgagtagctaagattacaggcatgccccaccacacctggctaattttgtatttttagtagagacagggtttctccatgttggtcgggctggtctggaactcccaacctcaggtgaaccgcccacctcggcctcccaaagtgccaggattacaggtgtttaagttaccgcacccggccaatacacattgatctacacaagagatgcaaagaaacagaaaacatgcaaaatattaacaaatgatcagtctacaacaaggatatataataggtgttcaatattctggcctttcacattttctttggtttagaatattcaatctacagatagcctgggcaacaaaccaagaccctgtctttaaaacgtaaataaataaataaaaatatatgagggggaaggccaggcgcggtggcttatacctgtaattccagcactttgggagtccgaggagggtggatcacgaggtcaggagttcgagaccagcccaaccaacatggtgaaaccccgtctctactaaaaatgcaaaattagccgggcgtggtggcacatgcctgtaatcccagttactcagcatgctgaggcaggagaatcgcttggaccgggagacagagtttacagtgagcctatatcacgccattgcactccagcctgggcaataagagcgaaactccgtctcaaaatatgtatatatacgagaggaaaaacgctgaatcaaaacatgtctctttcacagttaatacaactgtaatttctgatactggtataatgaaggcggcatcctacttcctggaagcccctccgttttgaagctctttgggaggtactgacctaggaagttcagctgcttttgatctcaaaaacacagcggagtattgctactttgctttataactgtggcaatatttgcttttatttctataaacctacaactcctgcacacttgacaaagcatttaactgctgagcaatttcgcaaacttcaataagcgatgccctcccacagccagatcatctcctccgtccagggctcaccggaacgcactgcaatcgccctgtcggtgacaagaggacgctggggcccttttccacaacagctgagatgcttttccttctggagaaaggacacaaaggttgactggctgcttttaaacagaggggcacggtggttggagaaaaaaacacgtctccaccggggaccctgggccaggcccagactgatgcgggcgcagcgggaagaggcgctcagaagagaaggcgggaaccccccgcctcggggtcctggcggggaggaggcgccgcttctccggagcagcagcgggaggccggcgcgtctcagacctagcagaagtccggagcgtcaccctccgaccctcgctccgcctcccgctaggccctcctgccccgccctgcctaggttgagcatgagcgctggctgaggtgaaaacccagctaggaagctgctggagagcggggaatacgtatagctgcgcgccggctggcacttccgcttccggttgcgcacggcattaagtgtaggggccgagccccaagagctttggaatgaggatgatgtgaagctgagagaagagctggggccacctcttcgacacgcgtacagaaaagtcccgttttctcgcatcccaggtggaccaggatccagatcaatctgtcgatattgggaacgacgccggaccaggaaacccagcgccaagggccgggttggaggcggggactggcgcagcgggcggggcacgcgtggaggcgtcacctaaggcttcgattgcagacagcgggatgctcatcgagtgcttttcttttcttttttaatttctctttttagttttttgagataaggctccggtctgtcgcctaggctggagtgcagtggctcggtcatagatcattgcagcctggaattcctgcgctgaagctatcctcccgcctcggcctccggagtagcttggaccacagttgggcccatcacgcccagctaagttatctttttctagacacttgggtctcactgtgttccctaggctggtctcgaactcctgagcctaaaggatcctcccccctcggcctcccaagcagcttggaccacaggtgtgtgccaccacgcctggctaatttatttttattttatttttatttttttgtagagacagggtctctctttgttacccaggctgatctggaactcctgggctccagtgatccttccaccttggcctcccaaagtgctgggattataggcgtgagccaccaccctagggaaattcttttctgcaggattttctccttgtttcttcaaccctctgcagggatataaacatatttacaaagataatcccgctgtagtcctagctactgcgggagaatcgcttgagcccaggagttcgagaccagcgacaccctgtttgaaagattaacctgatggggctgggggcagtggctcacgcctgtaatcccagcactttgggaagccgaggcgggtggaacacgtgagttcaggagttcgagaccagcctggccaacatgccgaaaccccatctctactaaaaatattttttaaaaaatagccgggtgtggtggtgggcgcctgtaatcccagctactcgagaggctgaggcaggagaattgcttgaacctaggagactgaggttgcagtgagctgatacgatgccacagtactccagcctgggcgacagagtgagactccgtctcaaaaaaaaaaaaaaaaagattaacctgttaatccataaaatgctctgtgcctctgatacattcagttccttctttaggcctttagttttgttgtgatacaattatcatagcatacaattaacctgtttaaagtgtacagtttcgtggctttttgtatattcatatatttgtgcatcgatcatcacaatcaattttagaacattttcatgaccacaaaaataaacccagtaccctagccatgatcacccaatctgctcatccagccccacccccacccccagagtccaaagcaacagctaatctttctgtctgtatagattgcctactgtagatattgcctgtagaattagaatataaaacacgtggtgtttggcttgtttcattcaatgttttcaaggttcatccaattagcatgtatcagtacttaatttttttttactaaataagattccattgtatggctgtatcataacatcagttgttggatattgggttttctcttttttttttttttttggcttttttggataatacaagacgcattttaagcagtggtcaaaggaacattcatattcctaaacacttttgtcaataaaaataagaatagctgggtgcagtggctcacacctgtaatcccagcattttgggaggccgaggcaggcggatcacctgaggacaggagtttaagaccagcctggccaacatggtgaaacacggtctctactaaaaaatacaaaaaccagcagggcgtggtggtgcgcacctgtaatcccagcttctcgggaggctgaggcaggagaatcacttgaacctgggaggcggaggttgcagtgagctgagatggcgccacggcacttcagcctgggcaactgagcacaactgtctcaaaaaaataaaaaataaaaaataaatccccagctcaaaaaataaaacctagaaaaagaatataaatgtaaaccaaaatggaaaaaggtttatttatttatttattttttatttcaatagcctttgggaaacaggtggttttgggttacatggataagttctttagtggtgatttctgggattttggtgcacccatcatccgagcagtgtacaatgtacccaatgtgtagttttttatccacttttatccctcacccttctcccacccttcccccagagtccccaaagtgcattctttctttctatccttttttgttttgttttgttttttctttttgagatggagtctcattctgttgcccaggctggagtgtagtgacatgatcttggcaacctccgcctcccaggttcaagcagttctcttgcctcagcctcctgagtaagtgagattacagacatgcgccaccatgcttggctaatttttgtatttttagtagagatggggttttcccacgttggccaggctggtcttgaactgctggcctcaagtgatccacccacttcggcctcccaaagtgctgggataacaggcgtgagccactgcgcccacccaaagttcattatatcattcttatgcctttgcatcctcatagcttagttcccacttataagtgagaacatatatatggttttccattcctgagttacttcacttagaataatagtctctatccaggttgctcagaatgctatgactttcttgctttttatagctgagtggtattctgtggtgtatatataccacatttttgttatccccttattagttgatgggcattgagactggttccatatttttacagttgcaaattgtgggctgtaaacatgtgtgtgcaagtgtcctttttttttttcttttttgagatggagtctccactctgctgccaggctggagtgcagtggcctatcttggctcactgcaacctccgcctcctgggttcaaatgattctcctgcctcagcctcccaagtagctgagactacaggtgcacaccaccatgcccagctaatttttgtatttttagtagagacgaggtttcaccgtgttggtcaggatggtctcggtctcttgacctcgtgatccacccacctcagcctcccaaactgctgggaatacaggtgtgagccaccatgcccagcctgtttcagacatttttaagactatgtcccattcatttaaaatactatttttccccattgaattgttttgacacctttgtcaaccatcattagactgtaaatgtgagcttagatgttttaaatggagaattataccaaaccttccaagttcaaatattcccagtgctccataacttaagaacaatgaaaatgaagaaatacttcctaattccttttatgaagaaagtataacattgatataaaatgtggtagaggctgggcatggaggctcacacctgtaatcccagcactttgggaggccgaggtgagtgggtcacctgaggtcaggagtttgatactggcctggcaaacatgatgaaaccctgtctctactaaaaatacaaaaatcagccaggtgtggtggcacgcacctgtaatcacagctacttaggaggctgaggcaggagaatcgcttgaacccaggaggcagaggttgcagtgagctgagatcataccgttgcactccagtggtgacagagcaagactccgtctcagaaaaaaaaaaaaagtggtagagtacaaaaaatgaaaaattgcagaaccatatcaattatgaatatggattcaaatatgctgttagctattagcaaataaaatacaagaccacattaagaaaataactatccccacatgaaatttagcataaaacagcagtattagtgcagttattagaaaatccattaaatagtccaggtgcagtgccttatgcctgtaatatcagcactttgggaggctgaggtggaggttgcattgcccaagctcatgagttccagaccagcctgggcaacatgttgaaaccccatctctacaaaaaagacaaaaattagtcgtgtgtgatctcagctactcaggatgaagtgggaggattgcttgaacccaggaagtggaggctgcagtgaactaaaaccgaccatgcccctgcactctagcctgggtgatagagccagaccttgtctaaagaaaagaaaagaaaaaaaatccattaaataatgcaccataaaaatacatctacaagaacaagtcatgtgactttctccatagatgctgatgaagcctttggaaaaaattcaacactcatttattattattgttattattattgttgtttgagatagggtcttcctatgttgtgcaggctggatcaaactcctgggctcaagggatcctccttcctcagcctcctgagtagctggggctataggcgtgcaacaccacacccagtgcaatgtcccttattgatatcagcactccagaaaaatagaaattagtgaatactttcttaagatgattgcctgtacctatagctgagtgtgtgtgtgtgtctgtgtgtgtgtgtactggaagcattagctaatacaattcagtaagaaaaattaattttgaaacatagaattgcagctgggcacggtggctcacacctgtaatcccagcaatttgggaggccaaggtgggaggatcacctgaggtcaggagcttgagaccagcctggccaacatggtgaaatcccgtctctattaaaaatacaaaaattagccagacatggtggcatgctcctgtaatcccaactactcaggaggctgaggcaggagaatcacttgaacccggtaggtggaggttgcagtgagccgagattgcaccactgcacttcagcctgggcgacagagcgaaactccatctcaaaaaaagaaaaagaaaaagaaaaagtaaataagcatagaattgcaaaagaaggaaactatctctttttgcagatgatgtgatattatatatggaaagccctagagaataaaataataagttaacagaatgtgaaattgctatctaaaaaccaatggcattcatctaccagtcaaaagccagtaaggtgatgtaataaaacttatgtagaataacataaagatacttaggtttagacttatcaaaaaatgtgtaaaacatacatgaagaagctttaaaacaaacattcttgaaagacacaaaatagacttgaacaaatggaaaattccttgttcttctataagatgacttaacatcatatagatagcaattcttaacaggttaactcaaaaatataacaatcccaggccgggcgcagtgtcttatgcctgtaatcccagcactttgggaggctgaggcaggaggatcaggaggtcaggagatagagaccaccctggctaacacgatgaaacccagtctctactaaaaatacaaaaaattagccaggcgtggtggcaggtgcctgtagtcccagctactcgggaggctgaggcaggagaatggcgtgaacccgggaggtggagcttgcagtgaactgagattgcgccactgcactccagcctgggcaacagagcaagactccgtctcaaaaaaaaaaaaaaaataccaaatccaagatggcggccagcaggaggctgattaagagcttgaggaaatctgcaaatgtgggatgaaaaacttcccgtaacatccaggttgatgaagctaatttattgacttagcaagggcttattgttcctgacaactctccatatgattaggtgaccttcagaatcgaaatcaactttccagcagagtatccattcaaactaccaaagatcacatttaaaacaaagatctatcacccaaatatcgacgaaaaggggcaggtctgtctgtcagtaattagtgctgaaaactggaagccagcaaccaaaaccgaccaagtaatccagtccctcatagcactggtgaatgacccccagcccgagcacccgcttcgggctgacctagctgaagaatactctaaggaccgtaaaaaattctgtaagaatgctgaagagtttacaaagaaatatggggaaagtgacctgtggactaaaatctgccacgattggttccagcaagtgtaagcagaggccccatgcagtgcattcagacacccggcaaagcaggactctgtggaaattgacacgtgccaccgcctgacattcacttgtggcagttactaactttctacagttttcttagtgaaaaatggtgtaggtaatctgtaaagaaaggattaaaatctaagatgttttaaatatatatacatatatatgtgtatatatatgtgtgtgtgtgtgtgtgtgtatatatatataacaatcccaataaaaaaccaaactttttaatggagttttgtaaattaattttaaagttcacatgggagcacaaacgtctgataatacccaagaaaactctgaaaaacaaaagtgacaatgccctacagatattaagacatactataaagcctctacaattaaaactgtggataggaacaggaacaggaaacagacaaatgggataaaatggaatatctagaaatagatccaggaacatatgggaattcagttcagaaaggtggtatttcagatcaattggggcaaaaatgcagtttgcaatgaaaggtgctaagattaagtggttagccatctggaaaaagacaaaattacatggataactcacaccattcacaaaataaactccaaatgaatcagggaactaaatgtgaaaaacaaaaatatatgcatatgtagggtatttgaatgatttttgggtgattaacgtaaaatatgtgaccacaaggcagcagtagctcacttgggcagtgctttgatgggtttgtgtgtggggtcccttgtgggcagcaagccacccaggtgctgaagcaagagaccgaggacacgagctgttccagtataataaaacataaaacaagaatagttgtaccagatatagatcatagacatgattatatatgaatatcattaatcattagtttgtggcaattactctttattccaatattataataatccttgctctataatcataacctaggaaaaatcaggctatacagagataggagctgaggggacatagtgaggagtgaccagaagacaagagtgcaagccttctgttatgcccagacagggccaccagaagggctccttggtctagcggtaatgccagcgtctgggaagacgtccattgccaggtggaccatggtctagcggtagcgaaaactgtcaaggaacaacacccgctacttagcagactgagaaagggagtctccttttccccgggggggtttatagaagactctgctcctccacctcttgtggagggcctgacatcagccaggcttgcccactgttatctggaggcccaaccgtctccctgtgatgctgtgcttcagtggtcacactcctagtccgccttcatgttccatcctgtacacctggctctgccttctagatagcagtagtaaattagtgaaagtactaaaagtctctgatatgcagaaataatggcataagctgtctttctctctgtctcctctccctctctgcctcaactgccaggcagggaagggccccctgtccagtggacacgtgacccacgtgaccttacctatcattggagatgactcacactctttaccctgccccttttgctttgtatccagtaaataacagcgcagccagacatttggggccactaccggtctccgtgcattgggggtagcggtcccccaggcccagctgtcttttcttctatctcttagtcttgtgtctttatttctacactctcttgtcgccacacacagggagaagcccaccgaccctgtggggctggtccctgcagtccctcatagcatgagaatatccaaaggctacagacttggaggtcactactcagaatgggaggagagcaagagaactccagggaaagaatgggagttgagagggagcttatgtgctaggtgaagttgcttagcagcctagtgggaagtttctaaatcagaaagctctgaagagcagcaagggattggggtcctttttatagctggagggtttatcttctctgtggtcatcaaatggttggcacaatttcaccggggtatgcagagcaggcaggccctaaaggactaaaaaatctgcttgtttggactatgtttaaaacaattgattcaggatcattaaaaaaaagaagaagaagaacgaaagaaaacacacacacacgcacacacacacacacacacacacacacaattggatggccaagcatggtggcttgcacctgtaatcccagctacttgggaggtcaaggcaggaggattgcttgaacccaggagtttcaggctgcaataagctgtgatcctgccactgcactccagcctgggcaacaaatcaagaccctatctttaaacaaacaaaccaaaagaaaattaaaaacaattgggtgtggaaaaacttgagtttggagccgggtgcggtggctcatgcctgtaatcccagcacttttggaggtcgaggtgggcagatcacgaggtcaggagatcgagaccatcctggccaacctggtgaaatcccgtctctactaaaaatacaaaaattagctgggcgtggtggcatgtgcctgtaatcccagctacttgggaggctgaggcaggagaatcccttgaaccagggagtcggaggttgcagtgagcccagatcgtgccactgcattccagcctggcaacaaagtgagactctgtccaaaaaaaaaaatttaaacaattggatgtggaaaaacttgagtttggggccaggtgcgatggttcatacctgtcattttagcactttgggaggccaaggtgggtggatcacctgaggtcaggagtctgagaccaagctagctaacatggcaaaaccccatctctactaaaaaatacaaaaaaaaagccagactaaaacttgagtttgacactggcagctattgtgagtaacggtgctatgaacactggtgtacaaaccaaaacaatacagaaaaaacccagcaaacactggacaaaggagagaatcagctttccagagttacagtattatcagattcaaatgtccagtttttaacaaaaatctcaaggcacacaaacaggaaagtatggcccattcaaagaaaaaataaataaatataaattttccctggaagagacctaatggtatatctactagacaaggactttaaaacaactgccttaaagatgttcaaagaactaaaggaagacatggaaaaactcaagaaaatgatgtatgaacagaatataaataacaatcaagagatagaaaacctaaaaagaaaccaagaagaaattctggagctaaaaaatacaataattaaaatgaaaaattcactacagggattcaaaggagatttcagctgttgcatcccagacctctccatggatgatgtcaaaggcatccccagtagtgacaaccaaaaatgtctccagacattgctaactgtcccccaggagtaaaatcatccccattggaaatcactgctctagacctacctcccaatttacagaaaatgcaggtgacagaaaaacaagctaaaagaaaccatgagggggccgggcactgtggctcaggcctataatcccagcactttgggaggccaaggcggatggatcacctgaggtcaggagtttgagaccagcctggctaacatggtgaaaccctgtttctactaaaaatacaaaacagccaggtgaggtggcatgtgcctgtaatcccagctactgaggaggctgagacgggagaattgcttgaacccaggaggcagaggttgcagtgagctgagatcatgccattgcagtgcagcttgggcaacaagagcgaaaactcgtctcaaaaaaaaaaaaaaaaaaaaaaaagacgcaaggtctcgctatgttgcccaggctggattccaactcctgggctcaatccatcctcccaactcagcctccccagtagctgggactacaggtgttagccaccatgccctatcttcaaagtttaatactatgctagtatataagaaaactgatactttataacccaatgttgaaacaatattcctctggaatcagactgcctgagattgaatctaggcttaaactctctgtgcataatatttttcatttgtaaaatgagggttagattaatatccactttctagctctgagggtaaatagttgaatagaatgctcatgtgagacgatttaactctgacatttcagccaactgtagcttcggggtgtcaccttgaaaagaggttggttcctttggaagaaatgttacttccagaagttagaataaaaggaatttatttatttatttatttatttttgagactgagtttcactcttgttgcccaggctggagtgtaataacacgatcatggcttaccgcaacctccgcctcccgggttcaagcgattctcctgcctcagcctcccaagtagctgggattacaggcatgcgccaccacgcctggctaattttatatttttagtagagacagggtttctccatgttggtcaggctggtctcaaactcccgacctcaggtgatctgtctgcctcagcttcccaaagtgctgggattacaggcatgagccactgcaccccaccagaattttttttttttttttgaggccaagtttcactcttgttgcccaggctagagtgtaatggcgtgatctcagctcactgcagcttctgcctcccaggttcaaggaattctcctgcctcagcctcccaagcagctgggattacaggtgcccaccaccacacccagctaattttttgtattgttagtagagacgaggtttcaccatgttggccaggctggtctcgaactcctgaccttcaggtgatccacccacctccaactcccaaagtgctaggattacaagcatgagtcaccacgcccggccatcacgacttttttttttttttagataggctgtcactcctgtcactcaggctggagtgtagtacagtgatcttcactcactgcagccttgacctcctggtctcaagagatcctcccacctcagcctctcaagtagctaggactacaaatgcatgccaccatgcccagctaattttgtttttttttttgtttttttttttgtagagatgaggtctcactatattgcccagcctggtctcaaactcctgggctcaagcaatccccctacctcagcctcttaagtgctggaattataggcatgagccactgcacctggccactctttttttctttctgtttaaagacagggtcttgctatatagcccaggctggagtggagtggtcattcacaggcatgatcatgtacactgcagcttacaactcccaggctcaagtgatcctcccgccccagcctccccaataactaggactacaggcatgtgccaccacacccagcaagtttcccttagttctctgaaatgttttaagactccactcaaatcttcttaaacagtcttaaattttcatcatgatattacctagtgatttttttttttaagatggagccttgctctatcacccaggatggagtgcagtggtgtgatctcagctcactgcaacctctgcctcccaggttcaagcgattctcctgcctcagtctcccgagtagctgggactacaggtgtgcaccatcatgcccggctaatttttgtattttagtagaggtagggtttcaccatgttggctaggctggtcttgaactcctgacctcaagtgatccacctgcctcagcctcccaaaatgctgggattacaggtgtgagccactgcactcagcctgacctagtgatgttttactcccagttctaatgttccacagttagagactccagacataccaaaatcagttaactttcatgaattcaccatggcccttatgcagtagttttcaacagtggctgcacattagattcactggaggacttttaaaaacactgatacccatgacacatccccataaatgctgttttaattggtctgaggtaggactcagcccttagtacatttctcaagtttccaggacattctataaggattaggttgagaattactgacttggcttctgcattcatatgctcttcttgtccacttgatatagtcctacacatctttcagaacttaagtcaaccttgcctcctctggagaaaatatcctgttaggtgtttttttgtttgtttgtttgttttgagatggaatctccctctgtagcccagtggcggatcttggctcactgcaacctctgcctcccaggtccaagcgaattctcctgccccagcctcctgagtagctggaattacaggcatgcaccaccacgccctgtaatttttgtatttttaggagagatggggtttcaccatgttggccaggctggtcttgaactcctgacctcaagtgatctgcccacattggcctcccaaagtgctggatttacaggtatgggccaccatgtcccacccactgttaggtgcactcttatccctcccctcccagcaccccatagcccctttgaaattcctttattataagtcttgtcataacgctttatcacttgcgctgtttatctttcatgctgtctgatgaactccaggaaagtagaaactaattttagtctagacacctgcttgtggaagttaggcaaacagtcttctgaaagactgtcttgatataaaatcccagatcccacaaaaaaaaacttttttctttacagcaaagcaagtggaaaaaacaaaaacaaaaacaaaaccctttattttttaattgctctatcaatgaaaaagaaaatagagaaatttcccaagggcaaacaattttttttttttttttttgagatggagtgtcgctcttgttgcccaggctggagtgcaatggtgcgatcttgactcactacaacctccgcctccgggttcaagggattctcctgtctcagcctcccaagtagctgggattacaggtgcacatcaccatgccctgctaattttgtatttttagtagagatggggtttcaccatgttggccaagctggtctcgaactcctgactccagatgatccacccacctcagcctcccaaagtgctgggattacatgtgtgagccaccgcacccggcctaataatttttttaagttagcagaatccagagatagaagaactttccctcaatatttttcttcccttccagaatacagagtgattgctgaaaaatagctgccccaccaggaatggcactagcccttgtgactagtttttaccacaaaatgttaaaggaaaaaaatgtgtcgtgttagccaaagagcaatgtgctttctcttttttattagacagggtctcaatctctcacccaggctagagtgcagtggtgctgcacagctcactgcagcctcaaacttctgggctcaagcaatcctccagcctcagcctcccacgtagctggaacttcaggtgtgcaccaccacacctaatttttaattttttgttccagagatggggtcttgctaggttgcccaggcttgtctccaactcctggtctcaggcagtcctcccgactcagcctcccaaagcactgggattgcaggcatgagtcaccatgcccagccagctttctctatttttactttccctttccacctagatgtacatggtgtctcaacattgaaagatactgggtttctgcaccaccaggggaagaaagccaactaaatttagattgttacatgagtaggaaattaactgaaactttgatatgtgtctgttacattaggttacccataaatacacagctagatggaaaagaaatgttactgggatataattttggttaaataggacaccatatgcatttgaaaggaacaaatggctttcctcaacttcctttaactctctcaaaatgcacacctgtggctctttctagatcttctacctcttcaagcactccatacataacactatctccctgtaacttttttttttttaagagacagggtcttgctctgtcacccaggatggagtgcagtagcatgatcatggctcactgcagccttgacctcccaggctcaagcaatcctcccacctcaacctccccagtagcagggaccatagatgtatgccaccatgcctggctgatttttaaatttttttgtaaagatgggtttttactatcttgcccaggctgctcttgatcacttgagccaccccttggcctcccaaagtgctgaaatacagacctgagtacctggacttctccctataattcttttttttttttttttttttttttttttgagatggagtctagctttctgtcacctgggctggagtgcagtagcacgatctcagctcactgcaacctccaactcccaagttcaagcgattctcctgcctcagcctccctagtagctgggattacagacccgcatcaccatgcctagctaattttgtatttttagtagagacagggtttcgccatgttggccaggagttcaaggctgcagtgtgctatgattgccactatgaatagccactgccctccagcctgggcaacatagtgagagtctcatcactaaaaaaaaaaaaaaaaaaatatatatatatatatatatattctttaaaagtttattttgtataaataataatgagacataatttcaccaggctggtctccaactcctgagctcaagtgctgggattacaggtgtgagtcaccgtgtccggccagttttgtttttgtttttttttttaatttcagacagggtcttactctgtcgcctggatggagtacagtggcacaatcactgttcaccaccacctcaacctcccaagctcaggtgatcctcccacctcagccccccaagtagttggaactacaggcacagtgccactatgcttggctaatttttatttttatttatttttatttttgtagataccgggttttgccatattgtccagactggtcttgaacttctgagctcaagcgatctgcccgcttcggcctcccaaagtgttgggactgcaggcactagccatcgcgcctggccagataatggtgattttttttcctaaagaaaaaaagtccaggcccatgtagatttttttcgtattgaagggggcctgcccctccacacctgttggtatttctcgcaaggtggagacaagagactgagaaaaggaaataagacacaaagtatagaggaagaaaagtgggcccaggagacgggtgctcagcaagtgaggatctgcaccggcactggtctctgagttccctcagtatttattgatcactttctctactatctgggcaagggggatgtggcaggactatagggtaatggtagggagagggtcagcaggaaaatgtgagcaaaggacgctatgtcacaaataagtttaaggaacggtgctgtgcctggatgtgcatgtaggccagatttatgtttcactttacacaaacatctcagtgcagtattgccgccagcatgtctcacctccagccataaggcggttttctcctatctcagtaaatagaatgtgcaatcgggttttacaccaagacattccattcccagggatgagcaggagacagatgctttcctcttatctcaactgcaaagaggccttcctctttcactaatcctcctcagcacagaccctttacgggtgtcaggctgggggacagtaaggtctttcccttcccacaaggccatatctcaggctgtctcagtggggggaaaccttggacaatacccgggctttcttgggcagaggtgcctgcggccttccacagtgcactgtgtccctgggtaaccgagaatggagcatggcgatgccttttaccaagcatactgcctgcaaacacatttttaacaaagcacatcctgcacagccctaaatccattaaaccttgagtcaacacagcacatgtttttgcaagcacagggttggggctaaggttacagattaacagcatctcaaagcagaagaatttttctaagtacagatcaaaatggagtttcttgtgtcttcctttttctacatagacacagtaacagtctgatctctcttttccccacaagtaacagtctgatctctctttcttttcccccgcacatatactgacctaaccataagaagtcagtgagactgggaaatatgcatcattgatgcagcctcacaataccccggccccatctgttctctcactactgagaccccaccctgtctcccccttcaccgagatttttttttttttttttttttgagacggagtctcgctctatcaccaggctggagtggcccgatctcggctcactgcaacttccgcctcccaggttcaagcgattctcctgcctcagcctccccagtagctgggactacaggcgcctgccagcatgcccagctaatttttgtatttttagtagagatggggtttcaccatgttggccagtatggtcttaatcgattgccctcgtgatccgcctgcgtcagcctcccagtctgtcccctcaccactactctctttcacggagaccccacccccatctctcccttcaccgactccccgcccccgtctctcgctcacggagtccccgcccctgtctcaaccaagaccgagtccccgcccccatctctccctcgccgagtcgccgcccgcgtctctccctcacccagaccccgccccatctctccctcaccgagaccccgccccatctccccctcaccgagactccgcccccgtctctccctcacccagaccccgcccccatctccctctcaccgagtccccgcccccatctctccctcaccaagaccttgcccccatctccccctcaccgaggctccgcccccgtctcaccctcaccgagaccccacccccatctcgcccttcacccagtccccgctcccatctctccctcaccgagaccccgcccccgtctgcctccctccgggtggctaagccgcacctgaagccgcacctggtcgcagaggctactgctggggaaaccgttgggccagcggcggctaaagggcaggaggcgccgctgtggccacgcgcacttctgattccgctccagggtttcagaaggaactgagggctctggacccggcctcggaggcctgaggagttgggaggggcggcggccgcgtcctccgcaactctggggagaagtcttagtttccgcgcagccaaacgcgattggaccccgccctccggcttcactggggaccgtgggggcggaacccggcgggaggacgtatggggggctggaccatgatggagggagtcggttgggctggacctcgaaatgcctctgctcgctttcctctgcgcttatgccgccatgtacgagtatgcgctgtttccaggtggtttgttatacagcagtagataactgatacatcccttttcactaatatttttatttcctaatacaatttttaaataattttttattttataccaaaaataatagtgaagagggtttttttaaggtcaggatctccctctgttgcccaggctggagtgagtggcgcaatcatggctcccgcccccgtctgtccctcaccgggtgcccgcccccatgtccccctcaccgagaccctcaccactgcagcctccaacccctgggctaaagtgaccctccggcctcaattcctctagtaggtgggactacaggctcgtgacaccacagcaggctaattttttgtggagatagcggttgcactatattgcccaggttggtcttgaactcctgggctcaagggattctcctacctcaacctcccagtttgtaatcagtcttcaaagtgttgggattacagacgtgagccaccgctccaggcctggtttttccacatggattatgtacatgtggcttctcaccacgttgagtcgatgcctgtcaattaagggataactaatcaactgaagactttgtcactcttattgcactcatagggattctcccccatggaaagtctgtcttgacaagcaagcaagtgcattgctacattagaagctgctgccatttaggttgggtgtggtggctcatgcctataatcccagcacatttggaggccgaagtgggcggatcagttgtggtcaggagtttgagaccagcatggccaacatggtgaaaactcatctctactaaaaatgcaaagattagccgggcgtggtggtatatgcctgtaatcccagctacttgggaggctgatgtgggagaatcgcctgaacccgggaggagaagattgcaggagccgagatcatgccactgcaacccagcctgggtgacagagcaagacgcgagactctgtcgcaaaaaaaaaaaaaaaattgctgccattttcagagcacctagactgcttctgccttgtctgaattccttcaaattgagtacgatgaatgctttgccataggttccattatagtcatgacattcataaggcttttcatacacagatattttattctgatagtcatctaaacaaaaactgaattctgtgtaaatattcaacatgcgagtctcatttatggacgacgtgcctacttgtgagacctctctgtgagtaagcatattttgaataggtttagaatgttccccaagttcatgaaactcagaaactctctcctgaagggtggcttctcttgggcatagacaaggagaaccttgtctccaggttcttcccattgtggggtggctcttccatctcatggcctccctgactcgtgctgcggagaaccggcaatcatcctcctgcatcttactctcttccggccagcagattgttttccccaactttattccgctttgcagctatctttttggtgctacatggtcttctggtctgaaatgaattgggaaaagaagtaaatcaggtttttgtttttgtttttgttttttgttttttgtttttgagacagagtcttgctctgtcgccaggctggagtgcagtggcgcgatctcggctcactgcaaccgactcccaggttcaagcaattctcctgcctcagcctcccaaatagctgggactacaggcgcgtgccaccacgaccagataattttttgtatttttagtagagaccaggttttaccatgttggccagcatgttctccatctcctgacctcatgatccgtcggcctcagcctcccagagcgctgggattacaggtgtgagccacctcgcctgaccatcagtttgttttttgtttgtttttttgagacagtgtctcactctgtcacccaggctggagtgcagtggtgcgatcacaactcactacagcctcaaactcctgggctcaagttatcgtcctgctgcagcctcccagtgctgggagtacaggtatgagtcactgtgccaggccttcaaaatttatgtttttggataaaaaatgatgacataatggtgctttgttttgttttgtttttgacacaagatctagctttgtcacccaagctggagtgcagtgacgtgatcatggctcaatgcagcttcgacttcctgggctcagaggatcctcccacctcagccccccaagtagctggaactacagttgcacaccaccatgcccggctaatttttgtatttttggtagagacggggtttcaccatgttgcccaggctagtctggaacttctgagctcaagcgatccgcccgcctcggcctcacaaagtgctgggattacaggagtgagccactgcatccagctcgataatggtgatttttttttaagatttttttttttttttgagacagagtttcactcttcttgcccaggctggagagcaatggtgtgatcttggctcactgcaacctccgcctcccatgttcaagcgattttccttcctcagccgcccgagaagctgggattactgacatgtgtcaccacacttggctaattttgtattttcagtagagacggggtttctccatgttggccaggctagtcttgaactcccaccctcaggtgatccgcccacctcggcctcccaaagtgctggtattacaggcatgagccaccgcacccagctaagaatttttgtttttttaagaataagaaaaaagactccgtctgaaaaaaaaaaaaggaaagaaaaaaataaagtccaggcccatgtagattttttcatatactgacctaaacataagaagtcagtgagactgggaaatatgcatcattgcaatatgcagcctcacaatatctggccctcatctctccctcactgagaccccgcccccgtctctcacctcatcgagaacccgcgctcatccttctctgagaacccgcccccatctctccatcaccaagaccctgcctccgtctgtcccctcgatgactctgctctgcccacccctcaccgagatctaacctctgtctgtcccctcaccgagtgaagggggcctccccctccacacctctgggtatttctcgtcaggtgggatgagaggctgagaaaagaaataagacacagagacaaagtatggagaaagaacagtgggcccaggggacctgcaccgctggctgtctctgagtttcctcggtatttactgatcattatttttactatcttagtgaggggagtgtagcagggcaacaggtggggagaaggtcagcagggaaacatgtgagcaaaggaatctgtatcacgaataagttcaaggaaaggtactgtgcctggatgtgcacgtaggcctgatttaagtttcactttacacaaacatctcagtgtagcaaagagtaacagagcagtattgctgccagcatatcccgcctctagtcacagggcagttttctcctatctcagaattgaacgaatgggaatggtcagtttacacggagacattccattcccaggaaggagcaggagagagaagccttcctcttatctcaactgcaaagaggcctccctctttcactactcctcctcagcacagaccctttaggggtgtcaggctgggggatggtaaggtctttcctttcccatgaggccatatctcaggccatctcagagctttcttgggcagaggtccctgcggctttccgcagtgcattgtgtccctggttaatcgagaatggagaatggcgatgacttttaccaagcatactgcctgcaaacatactgttaacaaggcatcctgcacagccctaagtccattaaactttgattcaatacagcacatgtttctgtgagcacagggttggggctaaagttaagactcacagcatctcaaagcaaaacaatgtttcttaatacagatcaaagtggaatttatgtcttccttttctacatagacatagtaacaatctgatctctctttcttttccccacaactgagtcccgggctccatctcctggtagagtccagccctacagggctttgcgggtgttctccccatgtgtggagatgagagatcataagaaataaagacacaagacaaagagataaagagaagacagctgggccctgaggaccactgccaccaagacgcagagaccagtagtggccccaaatggcggatgcactgatatttattgtatataagacaagggggcagggtaaggagggtgagtcatccaagtgattgataaggtcaagcaagtcacgtgatcataggacagggggcccttcccttataggtagctgaagaagagagggaagacagcatacatcagcattttctttttttttttttttttttcccccgagacagagtctcactctgtcaccaggctgtagtgcaatggcccgatctcagctcactgcaacctccgccctccgagttcaagcgattctcctgcctcagcctcccaagtagctgggattacaggcgcctgccactgcacccagctaattttttgtatttttagtggagatggggtttcaccttcttggccaggctggtcttgaagtcctgacctcgtgatccacccgcctcggcctcccaaagtgctgggattacaggcatgagccactgcgcccggcccagtgttttcttttacgcacttatcagaaagataaaagactttaagactttcactatttcttctaccactatcttctaagaaattcaaagaggaaccaggagtaccggaggaatatgaaagtggacaagaaaagtgaccactgaagcacagcaccacagggaggggtttatgcctccggatggctgcgggcaggcctggataatatccaacctcccacaagaagctggtggagcagagtgttccctgactcctccaaggaaagggagactccctttcatggtctgctaagtaacgggtgccttcccaggcactggcattaccgcttgaccaaggagccctcaagcggcccttatgcgggcctgacagagggctcacctcttgctttcttggtcacttctcacaatgtcccttcagcacctgatcctacacccgcccgttattccttggttatgttagtaatacaacaaagagtaatattaaaagctaatgattaataatgttcatactaatgattgataatgtccatgatcatctctatatctaatttataactattcttattctaactgttttctttattatactgaaacagtttgtgccttcagtctcttgcctgggcacctgggtaatcctccgcccacagactcccgcatcactgagtcccggtcctcctatcctacacggagtctctaccttcatctccacactcagggagactccacctcggtctccgccttcactgaatccccgcccccattgcgccttcactgagacaccagccccatctacgctcacagagaccttaccccgtctccccgtcaccgagaccgctcccccatctcgccctcaccaagtccccgcccccgcctcgccctcaccgagtccccatccctgtctctcccccactgagaccccgcccccgtctcgccctcatcgagtctccgcccccgtcctccgtcatcgagtctccgccccgcctcgccctcaccgagtccccgcccccgcctccccctcactgagtccccatccctgcctctcccttactgagaccccgccctcgtctctcccctcacggagaccccgcccccgactccccctcatcgagtacccgccccgtctatccttcatcaagtctccacccccgcctctccctcaccgagtccccgcccccgcctccccctcaccgagttcccatccctgtctctcccctcaccgagaccccgcccccgcctctccctcatcgagtccccgccaccgtctctccttcatcgagtcccctacccttcccgtcatcgagtccccggccccgtctccccctcatcgagtccccgccctcttctctcccttcactgagatcccgccctcttctctcccctcactgaggtcccgcctctgacagcccctcaccgagtccccgccccccgtctctccctcaccgagttctcgtcccagtctccccatcacctaatccccacccctgtctctcccttacgaagtccccggcccccggttcccctcaccgagaccctgccctgtctgtcatcgagtccctgtctccccctcacctagtccctcttctctcccctcaccgagtccccgcccccgtcgtccgctcaccaagtccccgcccccgtctccccctcaccgagtcccgccctcttctcttccctcaccgagtccccgcccccgtcgtcccctcaccgattcccgcccccgtctccccgtcaccgagtccccgcccccgtctctcccctcaccgattccccgcctccgtctcccctcaccgattcccgcccctgtctctccctcaccgagtccccgcccccgtcaatcctctcaccgagtccccgcctccgtctcccctcaccaagtctccgcccccgtctctcggtcaccaagaccccacccccgtctccccctcaccgagtccctgcccgggtcttcctgcctccacgtggcgaagccgcacctgaagccccacctggtcgcaaaggctggtgcaggggaaaccgttggttcagctgcggttcctgggaagggggtgccgctctgatcacgcgcacttctgattcccctctcggggctcggaagcggctgagggctctggacccggtctccgaggcgtgaggcggtgggagggtcggcggccgcgtcctccacgaccctggggagaagtcccagtttccgcgcagccgacaacggttggaccccgtccctccggcttcactgggcaccgtgggggcagaacccggcggcggcttggggtgggggcgggaccacgatggagggagtctgttgggcgggacctcgaaatgcctctgctcgctttcctctgcattcatgcggcttgtacgaggatgcgctgtttcctggtggtttgttatacggcagtagataactgatacatctctcttcactactttgtttgcgtttttataggtcagggtcttcctctgtcgcacaggctggagtgcagtggctcgatcacggctcacggaaacctccaatccctgggctcaagcgatcttccctcaaattcaacagtagctggaactacaggctcgtgacaccacagcaggctaatttttaaatttttcgtggagatgggaggtcacactatattgcccaggctggtcgcgaactcctgagctcaagcgatcttccctctttggcgtcccaaagagctgagattgcaggtatgaaccaccgcaccgggcccattctcaacatctctcaacaaactgataaagagcatgtaaaaaaatctacagctaacattgtagtgaaatactgaaaactgttctaagctcaggagtacagcaacgatgcccactctcacgaattctatcaagcattgtagttacggccacgcgcggctcacgcctgagatcctaacactttggaaggaagatcgctttgagttcaggagtttgagaccagcctgggcaagatggcaaaaccctgtctcaattttaaaaaatacaaaaattagccaggcatggtgatgcatgtctatagtcccagctacttcggagactgacacaggaggatcacttgagcccggaggcagaggttgtagtgagctgagatggcaacattgcactccagctggggcgacagaggaaggccctgtctgaaaaagaaattggaagaaacattatctacatttcttttctgccattatttacagacaacataattgtctaagtgggagatccaaaagaatctaaattgttacacataatgtgcgggttagcaagaatagtggctaaaaactcaatatgcaaagataattgtcttgtctctctctttttttttttttttttttttttttgacggagtcttgctctgtcgcccaggctggaatgcagtggcttgatcttggcttgctgcaacctccacctccctggttcaagcgattctcctgcctcaggcccctgagtagctgggattacaggcgcatgccaccacgcccagctaatttttgtatgtttttagtagagacggggcttcgccacgttggcaaggccggtctggaactcctgacctcaggtattccgctggcctcggcatcccaaagtgctgggattacaggcgtgaggcaccgcacccggccgacttgtctcttttaacagcaatattacaacagcaataaaataagtagaaataaatacaacaaaaaagtatgcaatatctcttccgagaaatttgtaaactactattgaaagaaatcaaagatgacctagatcaatggatagaccttccttgttgatggattagaagtttcaatataaagacttgaattcttcttacttaatatagaaagttaacaagttttcagtcaaaataacatgtttgatgaggaacctgatctacttataataaaatgtatgtatgtggaggtacaaaatactcctgaagaactgttggcacttaccctacagacattaagaaatagaaagacagggtcgggcacggtggcttacgcctgtaatcccaacactttgggaggccgaggcgggcggttcaccaggtcaggagatcgagaccatcctggctgacacggtgaaaccccgtctctactaaaaatacaaaaaatagccgggcgtggtggcaggcacctgtggtcccagctactcaggaggctgaggcaggagaatggcatgaacccgggaggtggagcttgcagtgagcagagatcgtgccactgcactccagcctgggcgacagagcgagactccgtcgcaaaaaaaaagacagtaatattggtgtagtggtaaataaattaaaccaataaatagaatagaaagccccaaaatacacccttatgaatgaggtgtgttcttggccattatgaataatgctgctataaacgtgggtggtcaaatatctttttgagagcctgttttccattcttttagatatatacccagaagtgggattgctagaccatgtgataataccaattttaattttttgaaccactgccatactggttttcatagctgctgcaccgttttatagtctcactaacagtgcacaggtgggccaggtgtgctggttttcatgcctgtaatcccagcactttgggaggctgaggtggatggatcacctgaattcaggaggtcaggaccagcctggctacatggtgaaaccctgtgtctattaaaaatacaaaagaattagctgggtgtgttgagtcccagctacttgggagactaaggcaggagaatcgcttgaacccaggaggtggaggttgcagtgagccgagatctcgccagtgcactccagcctgggcaacagagcaagactctgtctcaaaaaaaaaaaaaaaaaaaaaaaaaaaaagaattcacaacacaatgactgtgttaacaatgttgttgaagttcatcctaagtttggtaattggggtggccatttgtgttaactaattgcctttatccaaatgaaaaataaaaattcttatatccttttggcaagcaggcagttttagcttataagcaggtgcctaaggaaatagaagtgtgctactgatgcaggtaagtgccatcattggggattcacccaggaaagaattcaactggtggtgctacacaaggatctttcattcactcagagttgctttttccagagtacagctaaaacctatgcagtgtgcccagaatcagcattttgtgctgttggctagctatagttatactcacttttaattacatgcaaattaaggggtgtgccatgcagaactttctagaaaggaggctataacttccaggtgattgttgtggaagtgaatggtaactttcatgttgttgccatggtacttatcaactgtcatggctctggtaggagtgtcttaccctaacaagcaaggagagcaactagagatggcttttggtgccatctgctggttcccggtggcttcttcactttatcctgttgggaccaggaaacaaagtaagtcctacccagtctcctacctcactatggtctgaaggttgtatgttgtgtgtgtcctgcctccacaccaccactccgcaaagccaaatgcttaaatcctaaccgcagaagtgatgaaattaggatatgaggccttagggaggtgattagatcatgagggcggggccttcgttaatggatttactagcaagtttgtccaagtcgccttattttgttgttgttgtcttgttttgttttgttttagacttgtagcagcctgaagccatggtttttagtttctgtttctagtgataagtggaaaagagggatgaggaagaggctttgcaggcccaaccagaaacaaaaactaacaacccataactgtattcttgaacacccctgtatgggattggccgtggagactttctcaccccttctatcatgtgattatgaggtatgaggtaggaaatgtctttgtgtttaaggagggactgttctgaacgtccatgctgattcccactgaagacgttaaactctagagtctgtgggaaaaggaagaagcttaattgaatgtctttcttttttctttcttttttttttttttttttttgaagctgagtctcactctgttgcccaggctggagtgcagtggcgcgatctcggctcactgcaacctccacctccgggttcaagtgattctccttcctcagcctcccgagtagctgggattacaggtgcatgccaccacacctggctaattttttatttttagtagagatggagtttcaccatgttggccaggctggtctcaaactcctgacctcatgtgatctgcccgtctcagcctcccaaagtgctgggattacaggggtgagccaccgcgcacgacctgaatgtctttttttttttttttttgagacggagtctcactctgtcacccaggctggagtgcagtggcgcgatatcggctcactgcaacctccgcctcccaggttcaagcgattctcctgcctgagcctcccgagtagctgggactacatgcacctgccaccacgcccagctaatcttttgtgttttgtttttagtagagacggggtttcactgtgttagccaggatggtctcgatctgctcacctcgtgatccacccgcctcggtctcccaaagtgctgggattacaggcgtgagccaccgcgcctagctgaatgtctttcttacgagccctgggtactgggcttgaaaccacctttgcaaaaattataactgagaaactgattacagggaaagagatctgaccaaactaactgcatcttgcttctaacctccacactgtccttgttcattcctggacataggccaaactaagtttgggatgaacttagtttatagtttaactttgaaacaaaaacaacaataatgctttcccaaaacaaacctccttttccctggagactagactgcctttgcaggactaacacattagccacagataaggaattatggtttaggagtcatgcagctggtgggtgcaatattctggacctccccaaattgctcctggggataaaatcactatcgtaaaacctagaatcagtgcttgagatattttgcagaccctgtgtttcagtgcacaagttgaggccacctagatggataaaccggctcatctggtcttgtggttcccacccaggaactgactcagagcaacaggacaggttccactccctgtgatttcatctcagactcaaccaatcagcacttcccactttcagaccccctattatccttaaaattatctcaaattatccttaaaaaccacgatctcaggccaggtgcggtggatcacgcctgtaatcccagcacattgggaggccaaggcaggtggatcacctgaggtcaggagttcaagaccagcctggccaacatggtgaaaccccgtctctactaaaaaaaacaaatagaaaaattagccaggcgtggtggcggccacctgtaatcccagctactcgggaggctgaggcaggagaatctcttaaacccaggaggaagaggttacagtgagctgaggtggcgccattacactctagcttgggtgacaagagcgaaactctgtctcaaaacaaacaaacaaaccccctgatcccagagttttcagggagactgatctgaataatagtaaaattttggtctcctgtacggctagctggctctgcatgaatgaaactctttctttattgcaatttcctgtattggtaaatcagctctaggcagttaggcggttacaagcttggtaactcatgcctataatcccacactttgggagcccacggcaggaggatcgattgaggccaggagttagagccaagcttgggcaacatagtgacatcccatctctacaaaaagaaaaaaaaatagctgactgtggtggtgggcgcctgtagtcccagctactgaggaggctgaggtggaagaatcacctgagtccaggagttccatgctgcggtgagctatgattgtgccattgcacaccagtctgggtgacagagtgagactgtctctaaaaaaaaggaaaaaaaaagaaagaaaatccatcagcagatagctcttggatctaccttcactttagcctcagaccatgccacaacccctctgttctcccctgctaccaactttccaaaccactttcttctcatcgggattattgccttaactttccaattacgctccctgattctacctttgattcccaagagttgtacaaatgacagacagatattcttaaaatatatatcagataatattgctccagtagctcagacccttctatgactttgcattgcactcatagtaaaacccaaaatgtttagttgttctcatggccccatatgatctgactgataattgacttccttcctgctagtctccatcctacccaactcacttaaaccatttcagacacagggcttctgctgttacagaagcattgtcctgccttcctgcctcagggcccttgcacttgctgttctgtctttcctcagaaattgacagacatcccctaaattccttcagtcatttcctggagatgaagtggaaatactgtgtgtagatgactctgagtcccagttttctcatctgtcaaactgttgttccatccccatcccagcttggaaaaggcttttttttttttttttttttttttttgctggccccttgctctgttgcccagactggagtgcagtggcacgatctcagatcactgcaacttgaaccctcgtgagttcaagcaattcttatgcctcagccacaggaatagctgagattacaggcgagcaccaccacaccagctaatttttgtactttttttttttttgagattgagttttgctcttgttgcccaggctggagtgcaatggcactatctcggctcactgcaacctctgcctcctgggttcaggcgattctcctgcctcagcctcccaagtagctgggattacaggggcccaccaacacacctggcaaattttttgtatttttagtagagatggggtttcttttttttttttttttttttttttttgagatggagtttcactttgtcgcccaggctggagtgcagtggcgcgatctcggctcactgcaagctccgcctcccaggttcacaccactctcctgcctcagcttcctgagtagctgggactacaggcgcccgccaccacgcccaggtaatttttttgtatttttagtacagacgggatttcactgtgttagccaggatggtctcaatctcctgacctcgtgatccgagcaccttggcctcccaaagtgctgggattacaggcgtgagtcactgcacccggccaagatggggttttatcatgttgaccaggctggtcttgaactcctgacctcaggtgatccacctgcctcagcctcccaaagtgctaggattataggtgtgagccactgtgcccagccaattttcgtacttttagtagagacgaggtttgaccatgtttgccaggctggtctggaactcctgacttcaggttatccgtccacctcagcctcccaaagtgctgggattacaggtatgatgaaaatgctttttcaagtgataactttccaatagggaaggaaggtttaaaggtaagtttcaaaaagcacctgcttgagatgaaatgtaataccataggtctccagaagacaacagcgcatcacttggtttgccttataaatccttaattctcaaaacacaggaattaagagaaacagcgaacatttgtagacctcttcacccttcgttagggggaaagtgaaaataactatttgctgggcatctcttgttcttttctatttttattattttaattgatgtcccattccaggatgttgggcatctattgtttcatctggacactattttatatctgtgatctactttatttatttattttcctttttttttttttaagagacggagtctccctctgttacccaggctggagtgcagtggtgtgatcttgattcactgcaaactccgccttccgagttcaagcaattctcctgccacagcctcccgactagctgggattacaagcacgcaccactatgcccggataactttttgtatttttagtagaaacgaggtttcaccgtgttagccaggctggtctcgaacccttgacatcaagtgatccgtccgcctcggcctcccaaagtgctgggattacaggcgtgagccaccgtgcccggcctattcatttttcttttttctatttctttttttttttatatagagaaggagtctcagtctgtcacccaggctggagtgcagtggcgccatctcggctcactgcaacctccgcctcccaggttgaagcgattctcctgcctcagcctcccgagtagctgggattacaggtgtgcaccaccacgcgcagctaatttttgtattttattgggtttttggtttgttttgtttcgtttgagacagagttttgctcttgtcgcccaggctggagtgcaatggcaccatctcggctcactgcaacctccgcctcccggattcaagctattctggtgcctcagcctcccaagtagttgggattacaggcgcccgccaccacgcccaactaattttttgtatttttagtataagcgggtttcacaatattgttcaggctggtctcgagctcctgacctcaggtgatccacccgcctcggcctcccaaagtgctgggattacaggcttgagccatcgcgcccgggctatttatttttctttttttaattttaattttaatgtttcatagagacagggtctccccatgttgcccaggctggtctagaactcctgggctcaaaggaccctgcctcaacctcccaaagtgccaggattacaggtgtgagcgactgcgtctggcctacatttgtgatttaaatcagcacatttctcatctctcagaactcctcaataaccatcggttggaaaaaagagcaaaaaacctaaatgtatttatatgtaatctctaggagttaacctcaccgaaagatacaaccgatttaagaagaaaatgttaaaactctcttcaagggcctatagaagaaacgggatgaatggaaacgtgattcactctgtggactggcagatacctctggaaatctggtgttctattgtaataagttctcgggaaggtagagacttttatttgggacatagaggcttggccaaccagaatggaggacccacccaagtcccgcccccaagcctgagccctctcctttgctccacccactctgcctgaagtcccctcaacccctccgacttcgcagtctcccagcccggccttctggggctggtcttcattggaagccacgcccccaggtctgtcggataaacattttacaacctattctctctgaagtctagtacctggaggcttcctctggaaataagaacttgggtctcccgcctggccaacatgacgaaaccccgtctctactagaaatacaaaaattagccggtcgtggtggcacacacctgtaatcctagctactcaggaggctgcggcaggagaattgctggaacccggtaggcgcaggttacagtgagctgaggtcgtgccactgcactccagcctgggcgacagagcgagactgcgtctccgaaaaaaaaaaaaaaaaaaattagccgggcatggtggcgggcgcctgtaatcccagctattctggtggctgagccaggagaatcgcttgaacccgggaggtggaggttgcagtgagccgagatggtgccattgcactccaggctgggcaacaagagcgagactccatctcaaaaaagaaaaaagaaaaaaaaaaaaaagaacttgggtctccacaacctcaagcctcctctcaaaaaaagaaaaaaagttttaatctccctataagctggaatccccactcccaccccaccccagctcccggtttgagctgtcctgccattctggaacaaatgaatgtatttcttttcctttttttttttttttttttttgagacggtgtctcgctctgtcacccaggctggagtgcagtggtgccatctccgctcactgcaacctccgcctccctggttcaagcgattctcctgcctcagcctcctgagtagctgggataactggcgcgtgccaccacacccggctaattttgtatttttagtagagacggggtttcaccatcttggttaggctggtctcgaactctgacctcatgtgatccgcccacctcggcctaccaaagggctgggattacaggcgtgagccaccgcgcccggccaatatatttcttaaatgtatttgattgaagtctcatgtctccctaaaatgtacaaaaccaactgcaccccagtcaccttgggcacatgttctcctggcctcctgagggctgtatcaccggccatggtcactcatatttggctcagaatgaatctcttaaaatattttacagagtttgacgcttttcgtcgacattgcttaggctggcatcgaattcctgggctcaagctgtaattgccggagggttcttcctgcccactgcataaagaaagacaatggcattgtagtaaaggaagagtttagtggacatgaggctggccatgccacgtgggagtcgaagttcctactcaaatcatctcaaagctcctaggttaggggttttccaaagacagtttgggggaacgggtggggatggcagagtaacaggtgcttgctgctgattggttggggcagatgcaatcataggggggtcgaagccttcctcctacaggctgaatcgattttgggtggggccataggagcagggttgacgggtccatgaggagtgttaggtgtcagacatgcaataaaacctgaaagggtatctccaaaggccaatctggggttctgcaatagtggtgttatttgcaggagtaattggggaagttgcatatctcataacctctggaatagtggctgacatacatttctgcgcctttgcaggaatcaggctcctctcctgctgatggctccccattagttttaccaaagcgattgagttttaggcaaagcttattatcacctaaactatagcctaaatgtttcttaaagttacctcagcccaatagcccaggaaatattaagggaaagggaagatggggggtggattggctcagatctctttcactgtcataattttctgatatatatttttttgagacagggtctcactctgttacccaggctagagtgcagaggtgcaatcacagctcactgcagcctcgacctccccaggctcaaatgacctgcccattctggagttcattcagcctcacaaaatgttggaattacaggcgtgagccacctcgactgtcctgattattatttttgcaaaggcaatggttgacaaagagtcaaactctgtaaaatatttgaagagatttattctgagccaaatatgagtgaccatggcccacgacacagccctcaggatgtcctgagaacatgtgacaaaagtggttggggtgcagcttggttttatatattttagggagacatgagacatcaatcaaacacatttaataaatacattggcttggtccagaaaagcaggacaactcaaagcaggaagcttccacgctataggtaaatttaaactttttttttttttttttttttgagatggagtttcgctcttgttgcccaggctggagtgcaatggtgtgaactcggctcaccgcaacctccgcctcccaggtgcaggcgattctcctgcctcagcctcccgagtagctgggattacagacatgtgccaccacgtccggctaattttgtatttttagtagagacggggtttctccatgttggtcaggctggtctcgaactcccgacctcaggtgatccgcctgcctctgcctcccagtgttgggattacaggcgtgagccaccgcgctcggccatatgtgcaatttattacatgttaattatacctcagtgaagctgtaggggctgggcatggtgagtagttcacacctgtaatcccagcactttgggaggctgtggcaggcagatcgcttgagcccaaaactttgagaccagcctgggcaatatggtgagaccccatctctacaaaaaaagaaaaattagctgggcatggtggcatgtgcctatagtcccaggtacttgtgtggctgagagggtaaggaacactacagccctggaggtcaaggctgagatgagccatgatgcgctctggcctgggcaacaaagcaagaccctgtctcgaaaaaaaattttttctttttttcctaaagaatgtgtaggccaagttaaccctccagacaggtaagaatgtgatatgtgtcatagcctgtaatttatacaataacatcaaggctgctttggtccaagggcaggatctatggcgagtatatgttcttacacaagaacagtaaataaagtagaaatcctggctgggtgcagtggctcatgcctgtaatcccggcactttgggaggccaaggtgggcggatggcttgagcccaagagttcaagaccagcctgggcaacatgacgaaaccctatgtcttaaaacaaaaaacaaaaaaaaacaaaaaaccaccaggcatggtagtgtgcacctgtagtctcaattacttgggaggctgaggtgggaggattgcttcaacccaggtgagggaggttacagtgagtcgagattgggccagtgcactccagcctgagggacagaataagactctgtctcaaaaaaaaaaaaaaaaaagtaggtggggcacagtggctcatgcctgtaatcccagcactttgggaggccaaggtgggtggatcacctgaggtcaggagtttgagaccagcctgaccaacatggtgataccccatttctattaaatacaaaaaattagctgggtatggtggtgggcacctgtaatcccagctactcagaaggctgtggcaggaatctcttgaaccttgggggcagaggttgcagtgagctaagattgcaccattgcactccaacctgggctacaaaaacaaaaactccgtctcaaaaaaaaaaaaaaatctagaaatgttggagttgttctcaggacttgggttaagcagaagtcaagatggcagttggcatccaagatggagtcatgattgccttcacagcccctaatagggcccagttactgggcctcccttcagatactattgcatggcagcatggcagctttatatcctgggcaagattgtggagtaaaattactcaggttctactttaccagctatgttgctttgggcaacttaacttctctgtgcctcagtgtcttcatctctacctccctcagtgggctgcttataggagtccatgcatgaaggactgagcacagtgcctgccacataagaagcactcagtaggctgggtgtggtggctcacgcctgtaatctcaccacttcgggaggctgaggcaggaggatcgcttgagccaagcagtttgagaccaacctgggcaacacagtgagaccacgtctttacaaaataataataataataattctttttaaaaattagccaggtgtggtggtgcatgcctgtattcccagctgctggggaggatgaggtgggaagattgcttgaacccaggagttcgaggctgcagtgagctacagtcacaccactgcactccagcttgggtgatggagtaagaccatgtctcaaaataaataaataaaaataaaataataatgtcagctattgtgattatgctttgccttcattggagggcagtcctgaagcccccagccccttatctgggagaaggcaatgattaggggtggggaggttccaaaaggggagaagctctgtctgatgtcccatcaccccatcaccccttggggcaaggcccatgttagaggtcactaaggcagaatgaattctccatagggtaagcccaggaagaagacacctgtaaccagtggtatgccacagctcaggagagccaaatgctgaatcttcaactattttgtgagccagttgttaaactgttggtagcttgaaaccagctgtggtgagacagtgtttacaccatagtaatctgcaaatgctacagatcagggccttcttcccccacctgctagcactgcctgtaaacacttacctgcttcaaaattaatgcctgctggccagttgcagcggctcacacctgtaatcccagcactttgggacgctaaagcaggcggatcacttaaggccaggagtttgagaccagcctggccaacatggtgaaaccccatctcctaaaaatataaaaattggctgggtgtggtggcatgtgcctgtaatcccaggtactcaggaggctgaggcaggctgcagcataaaccttggaggcagaggttgcagtgagctgagatcgcaccattgcactccagcttaggtgacagagtgagactagcatctccaaaaaacaaacaaaaaaactaaaacgaatgcctgctgctccctcccttccaactggaaaggcagagaggaaaaagaaaggaagcttttttgccctagagttgttccaggttggggcatcggcaatgcacttccagaaccacctgcagagtccagcacagggctggtgttgagtcaccctcatgttctcccaaactgaccccagctctccagacactctctgcaagcaaaacaaacctcatttccctccttgttcccacaggctctgagacttcaccaatctctgtttctacctggttcaacccagccccctgatgtcctgggctggagctgctggggtggtcacagcattggacaatcagaccttgactagggccacatcaggggcacactcatagcctagtcctcatgtggccagatggagaaggaatttcaggtgaggtggctcatgcctgtaatcccagtattttgggaggccaaggcaggaggatcatttgcactcaggagttagagaccagcctgggcaacacagtgagacccccatctctacaaaaaataaaaagtagctaggtgtggtggcacattcctgtggtcccagctacttgggaggctgaagtaggatggcttgagcccaggagttcgagaccagtcttggcaacatagggagactcctgtctctgtctgtctacctgtctgtctatctatctatctatatttatttttgaaacagagtctctctctgttgcccaggctggagtacagtggcacaatctcggctctctgcaacctcctatctatctatctatatttatttttgaaacagagtctctctctgttgcccagactggagtgcagtggtacaatctcggctctctgcaacctcccactccagggttcaagcgattctcctgcctcagcctcctgagtagctgggattataggcatgtgccaccaagtccagctaatctttgtatttttagtagagacggggtttcaccatgttggccaggctggtctcgaactcctgacctcagatgatcctcccgccttggtgtcccaaagtgctgggattacaggcatgggacacaccgtgcctggccccatctctatttaaaaaaaaaaaaaaaaaaaaaaaaaaggttgggcgcagtggctcacacctgtaatcccagcactttgggaggccaaggtgggcagatcacaaggtcaggagtttgagaccagcctgaccaatatggtgaaactccaactctactaaaaatacaaaaattagccaggcatggtggcacacgcctgtattcccagctacttaggaggctgaggcaggagaatcatttgatcctgggaggcagaggttgcagtgagctaagattgcaccactgcaccactccagcctgggcaacagatcaagactccgtttcaaaaaaaaaaaaaaaagagagacagaaagagaaggaatttctactgcaactctgagtgggaagagcatgggaggaacatctctggctcttctctgatgggtaagcttggaataagaaaccaagtgtacccagctcagctctcttctccaacctggctctaagcaccagaggaggcacctgggcctgctgagcaggtggtgaacccacagagccggggcttagccacacacagcaacgctcatctcacgggtaggcactcacacttataatctgacacctgcatctttcaagtggttcagactcgaaaggcaggaaaaggtggtgttacttactgaacccctaaagcctgagccacctgcaaggccctgcccactcctgtccccattatctccttttgttttattttttttttttttgagacagggtctcactctgtcacccagtctggagtgcagtggtgatcacagttcactgcaacctccgagtcccaggcttaagcaatcctcccacctcagcctcctgaatagctgggataccagctgggtagatgcacaccaccacacctggctaattttttctgtagagacagggtttcaccatgttgcccaagctggtctcaaactcctgaactcaaagtgattcacttgcctcagatgtcccaggttggccttaaactcctgggctcaagtgatccacccacctcagcctcccaaagtgctgggtttacacatgtgagccaccatgcccggccctgacctcaacttcgacagctcttacccctgctcactctgccacacaaccttctttctgtttctggaaaatgccaagttcattctcatcttagcagtgctggcctttcctcttctgccctagctcttctgatctttgctttctcttcacctctcagatctcagcacagaggcctaccgtgctcactcaaccatgcaagtatgcctccatcacgtgaccctggtgtactggctcagagtctccaaaattacaacatggtggccgagcgcagtggctcacacctgtaattccagcactttgggaggccgaggtgagcagatcacgaggtcaggagtttgagaccagcctgaccaacatggtgaaaccccatctctactaaagatacaaaaattagctgggcgtggtggcgggtgcctgtaatcccagctacttgggaggctgaggcaggagaatcacttgaacccgggagacggaggttgcagtgagccaagatcgcaccactgcactccagcctgggtgacagagtgagactctgtccccacacaaaaaaactaaagcatggactggcttacctgtttgttgtcctgtcttctcctctatgagatctacgagggcagggtcttgtcagttttgttcactgtggtggcccagtttcccagaacctagaacagtgcctgcaaaatagcagaagctcaagaaagattggttgaatgaataaactgaatacttctcgggaaaaaaaaatgatttttttctttaatagtaaaataatatacgtcttggaaaatacagcatacaaaatacagaaaatataattgagcacttttatgagcatatcgatcattgaatcgcgagtctgcatcgcctatctctccgcgtctcttgcgtgcgtgtaggtatataaatggtgtataggcttgtgggtgtgcatgcatagacagtccttcttgggtactcataagggggctcagaccctcaggtgcccctgagtcttaaccccaccccttcttcatccgtcctgttcctgaagacgaccatgaaggtgactcttcattgagagcctctggaggctgggagcttttagagtaaggctttgcaatgtaaccgtgaggtagctatgatcatccttatttccagatgtgggaactaggcttcccagaggctgatgatatgaccaaggccacacagctggcaaacagtgattccaatggtctggaggtccctaggcctctgttctctcaacctggggctttcagtttcctcaagtctgattatctgccctcttcaaggtgctgctcagagggtctggggctcaatgatgaaaactgggatgggtcccaagggcaggtggagtagttacatccaccagtccatagactctttggggcaagccctgacgatgaccatacagtggggcagccccttacacaggatcttctccgcctcctgaccctcccaccccagcccctgcagctcaaggactctgagcttgggcatagtgaggcaggaggagaggatttcagtgggggagggcatttctggggtgacgaggggaccctgcaggcacagactctccagggccggcattccctccagcacagccaggccaggggcagagaggcccctcacggtcagccggatcttgcgcacatctcggaggtggcggctgatggccagcagggtgctgtcggcagacagggtgcagcccagcacctcaagcctctgcagatagctgagctcctgcaggccagcatccagccctgtctcggtcacacggtaggtaccacccagcaccagcgagcgcaaggcccggaagcgcgtcaggccctgcaggtgctcgtcacggaaggcggggacgcggtccagcacgatgcattcaagcaggggcagcacggtggggtcctgctgcttgtggagccaggccatggagatctcgcagctgtgcagctccagggtcctcaaggtgctgggcaggctggtgatgggcaccatgctcaggtcggccacgtgcaggcagaggcgcttcaggttggggcacttctggcccagggctctcaacagagcaggggacaactggggggcctgggagccagagaacaggtagccacccatccgcagggaatggagccgggatgccatgtaccttcgaaggaggtgccacatgactttaggtcgcatctgtaagagccagagattggggtgacagagtgagaggtatggagcttccaaggcccctgctgggctggagacacacaaccccggggtgggggattctggtgccctgctgggcttctgcccttgcctagccagtctcctccccaggttcaacctccccaggttcaaccagatggtttgagtgcaccatcttgcctgctagggctttgaacaaatctttttttttttttttttttctgagacaggttcttgctctgtcacccagtctacagtgcagtggtgagataatggctcactgcagcctggacctcctaggctcaagtgattctcccacttcagcttcccaagtggctgggacttctgacacatgcccagctaatttttgtgatttttagtagagatgaggtcttgctatgttgcccaggctggtctccaactcctggattcaagcaatcctcccatctcagcccctcaaagtgctgggtctacagtcgtgagccactgcactcggccacttagaataaatctggtaggggctgggcacagtggctcatgcctgtaatcccagcactttgggaggctgaggtggatggatcatttgaggtcaggagtttaataccagcctggccaacatggtgaaaccatgtttctactaaaaatacaaaaattagctgggcgtggtggcaagcacctgtaatcccagctactcaagaggctgaggcaagagaatcacttgaacccaggagacaaaggttgcagtgagtcgatatcgcaccactgcactccagcctgggcgatagagtgagactctgtctcaaaaaaaaaaaaaaaaaaaaaaaaagataaatctggtaggggaaaaaaagatactaacagaatctatctttagcaataaatttttaccgttttttctggactaagaaaaagagcagagcaacccattgatattttacccctttcttaatgatcacctccagtagaaataagcaacacagaataaaattttaaaagccgaaaactacccagagtaaattaggtctatgttaaaaaaaaaaaaaaaaaaacaacaaatgaaaaggctgggcacggtggctcacacctgtaatcccagcactttgggaggccaaggcgggcagatcacctgaggtcaggagttcaagaccagcctgaccaacatggagaaaccccgtctctactaaaaatacaaaattagccaggtgtggtggtgcacgcctgtaatcccagctacttgggaggctgaggcaggagaatcacttgaacctgggaagcagaggctgcgatgagccaagatcgtgccgttgcaccagcctgggcaacaagagcgaaactccatgtcaaaaaaaaaaatatatcaaagcctggtagagtggaagctgcaaaaatcaaccctgggaagttagacttagtagaaaataaaaaatatatataattgatagcactgggcatttcattctaagtacagtttatcttaaaaagaaaaagttagcatgcttacatctgccttttattgctggatttctctacttggcatcatagggcctaatggaaaaaggaaaattgtctaataacatattctttatgtgtgcttacaaaggtgtttcttttcttttctttttttttgagacggagttttgcttgttgcccaggctggagtgcaatggcacgatctcagtcaccgcaacctccgcctcctgggttcaagcgattctcgtgccttagcctcctgagtagctgggattacaggcatgtgccaccatgcccggctaatttttttttttttttttgagacagagtctcgctctgttgcccaggctggagtgcagtagcgcaatctcggctcactgcaatctccacctcccaggttcaagcaattctcctgcttcagcctcccaagtagctggtactacaggcgtatgccaccatgcccggctatgttttttttgtatttttagtagagacgcggtttcaccatgttagccaggatggtctcaatctcctgacctcgtgatccaaccaccttggcctcccaaggtgctgggattacaggcatgagccacgcgcctggccttaattttgtatttttagtagagacagggtttctccatgtaggtcaggctggtctcaaacacccgacctcaagtgatctgtccacctcggcctcccaaagtgctgggattacaggcatgagccactgcacccggccaaaaaggtgtttctacatcaaactcttccattcactgaagaaaatagcttatcatcaatccttcagaaagcatgcttacatttgccttttatacatgcatatatatacccatgtaatacaaactgtattagtctattttcatgctgctgataaaaacatacctgagactgggaagaaaaagaggtttaattggacttacagttccacatggctggggaggcctcaaaatcatggcaggaggtgaaaggcacttcttacatggcggcagcaagagaaaatgagaaagaagcccgggcgcagtggctcatgcccataatcccagcactttggaaggccgatgcgggcggatcacgaggtcaggagattgagaccatcctggccaacatgacaaaaccccgtttctactaaaatacaaaaaaaaattagccgagtgtggtggtgcatgcctgtagtcccagctactaaggaggctgaggtaggagaatcgcttgaacacgggaggcagaggttccagtgaactgagatcgcaccactgcactccagcctggtggcagaacaagactccgactcaaagaaaaataaataaattaatttaaaaaatacaaaaaattagctcagtgtggtggcacgtgcctgtagtcccagcttctcaggaggctgaggcaggggaatcacttgaacccaggaggcagaggttgcagtgagctgagatcataccactgcactccagcctggcaacagagcaagactccatctcaaaaaaaaaaaaaaaaaaaaaattaagaaaacgagaacaaagcaaaaatggaaacccctgataaacccatcagatctcttgagatttattcactatcacgagaatagcatgggaaagaccagcccccaagattcaattatttcccctgggtccctctcacaacacatgggaattctgggaaatacaattcaagttgagatttgggtggggacacagccaaactatatcattccaccccggcccctccaagtctcatgtcttcacatttcacaaccaatcatggcttcccaacagtcttccaaagtcttaactcatttcagcattaacccaaaagtccacagtccaaagtctcatctgagacaaggcaagtcccttccacctatgagcctataaaatcaaaagctagctagttacttcctagatacaatgtgagtacaggtattgggtaaatgcagccattccaaatgggagaaattggccaaaacaaaggggttacagggcccatgcaagtctgaaatccagtggggcagtcaaattttaaagctccaaaattatctcctttgattccaggtctcacaaccaggtcacactgatgcaagaggtgggttcccatggtcttggccagctccgccccttgtggctttacagggtacagcctccctcccagctgctttcacaggctggtgttgagtgtctgaagcttttccaggtgcatggtgcaagctgtgggtggatctaccattctggagtctggagaacagtggccctcttctcacagctccactaggcagtgacccaatagggactctgtgtgggggctctgaccccacatttcccttccacactgccctagcagaggttctccatgagggccccacccctgtagcaaacttttgcctggacatccaggcatttccacacatcttctgaaatctaggcagaggttcctaaacttcaattctttttttttttttttgagatggagtttcgctcttgtcacccaggctggaatgcaatggcacgatcttgagtcactgcaacctttgcctcccgggttcaagcgattctcctgcctcagcctcccgagtagctgggattacaagcatgcgccaccacgcatttgttgtatttttagtagagatggggtttcaccatgttggccaggctggtcttgaactcctgacctcaagtgatccgcctgccttggcctcccaaagtgctgggattataggcgtgagccactgtgcctggccctgaacctcagttcttggcttctgtgcaccagcaggctcaagaccatgtggaagctgccaagacttggggcttccaccctctgaagccacagcccgagttatacgttggcccctttcagctacagctggagcagctagggcacaggacaccaagtcccagggtgaacatagcacagggaccctgggcccccaggaaaccactttttcctcctgggcttccaggcctgagatgggaggggctgccgtgaaggtctctgacatggcctggagacattttccccatggtcctaattaggttccttgctacttatgcaaatttctgcatctggcttgaatttctccctagaaaatgggtttttcttttctatcacatagtcaggctacaaattttccaaacttttctgctctgcttcccctataaaactgaatacctttaacagtacccaagtcacctcttgaatgctttgccacttagaaatttcttccactagataccctaaaacatctttctcaagttcaaagttccacaaatctctagggcaggggcaaaatgccatcagtctctctgctaaaacataacaagagtcacctttactccagttcccaacaagtttctcatctccatctgagaccacctcagcctggaccttattgatcataccactatcagcattttgggcaaagtcactcaacaagtctctaggaagttccaaactttcccacattttcctgtcttcttttgagccccccatactgttccaacctctgactgttacccagttccaaagatgcttctacatttttgggtatcttttcagcaacgccccacttaccgctaccaatttacagtattagtctgttttcacactgctgctaaagacatacctgagactgggaagaaaaagaggtttaattgaacttaagttccacatggctggggaggcctcaaaatcatggcgggaggtgaaaggcgcttcttaacatgttgatggcaaaagaaaatgagaaagaagcaaaaaaggaaacccctgataaacccatcagatcttgtgagacttattcactatcacaagaatagcatgggaaagactggccccatgattcaattactttccccgggtccctcccacaacacgtgggaattctgggagatagaattcaagttgagatttgggtggggacacagccaaaccatatcatgaaccaagagagaaagaaacatgttttaatgaatcttctcaggcggctgaggcaggaagatggcttgagcccaggagatggaggttgcagtatgttatgattttgccactgcctgggtgacagagtgagatccatctcaaaaaaataaattagaaaaagataaactgcagagcataaatgttatgggctacttttgacagaggaatcaaatcttccttgccaaatttagacccgtgtgggtcagcagaaattgactagaaatagtggccaccgaatggtaactcacaagggtagcagttaaagttggtaaaattttaaatgcacacaaaaccaatggacgaatcaacttttcctcgcaaaaccaacaactaagtttcaacaactgagaaaaagtttcatattatcaggccagacactgtggctcacacctgtaatcccagcactttgggagactgaggttgggggacagcttcagtccaggagttcgagaccatcctgggcaacatagcaagactctgtccttaaaaaaagaacttcaaaagcaactgtattaaagggagttacagatggatatatacagtaaaattgtttaaaagtagaacactatctaaatagtagaacagcattacccgaagttcagaaatacattactaacactataattgtttttggacacacacatatgaagtaacgtaaaaggaagggtgcaaattcactttataatagcaattatctatgaagacagtttcaaaaagggcaacaaatatatctataaatgttttgagccagttgctgtggctcatgcctgtaatctgaacactttgggaggctaagtcgggagaatcacttgagcccaggagttcgagaccagcctgggcagcatagtgagactccgtctctacaaaaaataaaaaattagcaggtgtagtggcgagcgcccgtggttccagctactcaggaggctgatgcgagaggatcgcttgagcttgggaggtcgaggctgcaatcgcaccactgcactccagcctgagcagcagagcgagactctgtctcaaaaacaaaacaaaaacttgataacatagtcataaattagcatttatcgaatgataaatatgtgccagactgttctaagccctttccctgcgtgatctcagtgaagtcccataatagccccgtgaggcaggtactgtcctttatccccattgcagggatgaggaaattgaggccctgaggtcgaagaggagctggtaagcgatgatgccgagataggccccggatcgcctggctctaaatccccagcccgggccccgacacacagtcccagggtgggagaggtggtcttcggggtccgggcaccgcgaccgcggcccaggcccgcccggccagctgcgcgtaccgtgtagagcgtcaggtcgacatgtcgccacagccaccggtcgtccaccagcctcttccagcggtgacagaccctgggggaggggacgcgcggttagaacgaccccagccccgggccacatcgcatctccaggtgccagctgcgccctccgccctgcccttccccccggaggcggggccgcacctggagatgcggatccggtcccgtaccgggaggtaagagaagatctcgagcaggaccgagtccggcagttcgaccaaagtcgccatgatcccgccgacacgcacttccgcttccggttaaagagacccgaggggtcctgggggcgccgaggcggctgacagggcggcggccgcgaccttcccgtagccggtcgagaaatttgaccttcctctcgctgggaagtgattcggtcccagggccggaccagccgcggatggggaccagaaaccagcctggaaagcgtggctgaggcagtgagaggcttgcgggaggtggctgaggcgtgatttggccgcgactgggaactaagaccaagtccagaaggcggggctggagtgaggcgaagctcggaggcggggctagagacgaggaccaagtccggaaggcgtggccggggtggggtgaggatcggaggcggggctagagaccaggaccaagtccggaaggcgtggctggggtggggcgaggatcggaggcggggctagagacggggaccaagtccggaaggcgtggctggggaggggcgagacccggggacggggctagaggcgaggcccaagcccggaaggcgtcgctggagttgggcgaggctcaggggcggagccagagaacggaaccaagtccagaaggcggggctggggcgcggctagggggcggggctagagacgaggaccaagtccagaaggcgtggctggggtggggcgaggatcaagcccggaaggcgcggctggagcggggcgaggcctaggtggggctgcagacgagaaccacgccttggaggcgtggctagggcgggtagaggctcggacaaccgctggaaggcggggctggggcggggcgagaccttgggggcggggttgacgacgaggacctagccgagaggtcgtggtctggacggaaaccaggctgcagcaggaccaggcgccaagggcgtggctggggagcgatggagacgctcggaaggtggggagcgggggacggagacagggagaagactacgccatgaaggcgtggttgaggcggggcgaggcctgtgggtctggccccgagcgaatggcttggtagagagtcagagaactctatttttttacttaatgatgcttcttgatgtctatgcacaaggataaatttgtattactggaatatcgtggccaaaggacctgttgaatttttcactttcattgatactacagatattttctgaattggcaagtccaccaagaaactataaaaatgtgtgtgtgcaatggctgcacacagcagcttccttggtagtgtacgcagcctgttggttgtatgggttgctctaagggaccttggagacaggcctttccgatggatgttcatgtttctaaccttgcactaccacaatgtaggctccaaacaggcatgtgaggtgcctttggaaagccccagggcactgtggccagggttgacattggccaagttatcatgtccatccgcaccaagctgcagaacaaggagcatgcgattgaggccttgcgcagggccaagttcaagtttcctggccgccagaagatctacatctcaaagaagtggggcttcaccaagttcaatgctgatgaatttgaagacatggtggctgagaagcggctcatcccagatggctgtggggtcaagtacatccccaatcgtggccctctggacaagtggctggccctgcactcatgagggcttccaatgtgctgccccccctattaatactcaccaataaattctacttcctgtccaaaaaaaaaaatgtgtgtgtgtgtgtgtgtgtgtgtgtgtgtatatatatatatatatatatatacacacacacacacacacgcacgcctcctgaagccaggaggcggagattgcagtgacctgagatcgcgccaccacactccagcctgagtgacagagcgaaactccgtctcaaaaaaaaaaaaaaagaatatgaaagagattgtggaggttgcagtgagcccagatcgcgccactgcactccagcctgtgcgacgggtgcgagactccatctcaaaaaaaaaaaaaaatcatgttactgcaaaggacatgatttcattatctttttttttttttaaatttgggacagggtctctctctgtcacccagtctggagtgcagtggcgaaattatagctcactgcagccttaacctctggggctcaagtgatccgatccttccacctcagtctcccgagtagctgggactgtaggcacatgccaacacgcccggctaatttttgttttgttttttgagatgaagtcttgctgcatcacccaggctggagtgcagtggcacaatctcggctcactgcaacctccgcctcccaggttcaagtgattctcctgcctcagcctcccgagtagctgggactacaggcgcccgccaccatgtccggctaatttttatgtttttagtagagatcaggtttcactatattggccaggctggtctcaaacttctgacctcaggtgatccacctgcctcagcttcccagaatgctgggattacaggtgtgagccactgcgcccggctaatttttgtatttttttctagagccggggttttgccatgttgctcaggctggtcttgaactcctgggctcaagttcttcctgcctcagcctcccaaagtactaggattacaggcgtgagccaccacgcccagctgattgcattttttttatggctgcattacgtgtgtcttcttggcttgttgccctcctatatcagactgaattctggggtggcaggtgggacttgtgcaccccggccctgctgaggtgctcaggtaatggggggaggaaactcctatgcccctccctccacccctaagattatttcccttcttgtgaactctggcaggggaaggggagtgcctctaagtttggcagaacccaggtgtcccttccctgccatccctactcagttacagggggttcctgcaccaccagcatacagggctggagagagggaagtagtcaggtgagagcaaaagaaacccacatacaagctccttcctctgggccaggaacccaagaagcaaggggggagaagaagcctccccagcttgctccttgggtcttgacccaaaactctacctcctgggaagtatccacctcccccaaggaaaagcggctgtgagaacagcagatcttcctacagcaggctaggtctccatgtgcaaccacagcagtgagccttcaccaacaccttgtggtagctctgatgaatacgtaagttaaatattaaagacctggaaaaactggggccttcgagcaagggctagaaggtaaaacaaagtccttaagaccctgcctgggttttctcagaacttaagagttcagttaaaataatggaggcattcttacatacctcgtaaaccttgtaccaggatccactttattttttaaaatttactttcttttctttattattttgagacagagtttcgctcttgttgcccaggctggagtgcagtggcacgatctcggctcactgcaacctccacctcccgggttcaagccattctcctgcctcagcctcccgagttgctgggatttaaggcatgcgccaccatgcccagctaattttgtatttttagtagagatggggtttcaccatgttggtcagactggtttcgaactcctgacctcaggtgatagctgatccgcccacctcggcctcccaaagtggtgggattacaggtgtgagccactgtgcccagccttttttttttttttgagagagtccgactctgtcccccaggctggagtgtagtggtgtgatctcggctcactgcaacctttgcctcctgagttcaagtgattctcctgcctcagcctcccaggtagctgaaactacaggtatgtgccaccacacctggttaatttttgtatttttagtagagacagggttttgccatgttgcccaggctggtcttgaactcctgacttcaggtgatctaccaccttggtctcccagtgttgggattacaggtgtgatgtaatggcacccggccccattttcctcttctctcagcagcacttcccatccctttcccaactcctcgccccacagctcagcaccaagaccctgtgcttggcagatctttgaatcaagcactgagaaattagaacattttgaaaaagcaaacatttccttttccacccccggtgattacaaaagtaacatatgttctgtgtcagaaatctggaaaaacaccacgaagagggaaaatgaggccgggtgtggtcgctcatgcctgtaattccagcactttgggaggatcacttgaggccaggagtttgagaccagccagggcaacatagtgagactgtctctccaaaaattaaaaaaatcagccaggcgtggtggtgcacgcctgaagtcccaggaggtgagtccccttgagtccaggaattggaggctgcagtgagctataattgtgccactgcactccagcctgggtgacagagcaagacactgtctcaaaaaaaaattaaaaaattaaaaaattaaaaaaaaaaaagaagggagaatgagactctcagtaatcctaccatgaagtggtaactacagtcaatgcttgtgtgaccctgcatttctttgttttcaaacagtctcactctgttgcccaggctggagtgcagtggcatatctcagctcactgtgacctctgcctcctgggttcaagcgattctcctgcctcagcctcctgcgtagctaggattacagacgcctgccacatttttgtatttttagtagagatggggtttccccaattggccaggctggtctcgaactcctgacctcaagtgatccacccaccttggcctcccaaagtgttgggattataggtgtgagccaccgtgcctggctgtgacccaggatttctaagagaatgcaaagatgtgctgcttctaaacttccttaggcacctcagccccctcagctcacttttgaccttccaatctgtttcatcccggctagagtctccccaaaagcagaggcaggggaattcccacaaaggaatgccctaaatcatcccaagatggggccagtggggatttcaagaaaacaccaattaccagagcaatcagtccaaagcatttattagggaaacttacagagtgctccaacaatcatcaagacaggaacgaaaaggggtgttctaccgaggcacagctgcagctagggggtcaggacatggagttcagatgcacaagtcagcatgtctggtttccattactattttgagtaatgggccacctgctggtctggcaggtgtcagcttgaccaaaacaggattgtggattctttccctgggatgggacgttccacaaccttggttttatatttagattttcttttttttgtttggtttcttttggagacggagtctcactatgtctcccaggctggagtgtagtggcgtgacctcggctcactgcagcctctgcccccctgggttcaagagaagaattctcctgcctcagcctcccaagtagctgagactacaggcgcaggccaccacgcccggctaattttttgtattttagtagagacggggtttcagcgtgttgcccaggctggtctccaactcctgaactcacacaatccgcctgccttggcctcccaaagtgccaggattacaggtgtgagccaccacacctggcctatatttagattttcaaggccagtttctggaatttttaagcaaagtacacgggataaacattatgagaccttagcacagaaaaacagaagagaggttgggtgtggttgcttacacttgtaatcccagcactttgggaggccgaggcaggcggatcacctgaggtcgggagatcaagaccagcctgaccaacatggagaaaccccgtctctaccaaaaatacaaaattagctaggcatggtggtgcatgcctgtaatcctgggagtttctctcttgttgcccaggctggagtgcaatggcaccatctcgactcaccgcaacctccgcctccctggttcatgcgattctcctgcctcagcctcccaagtggctgggattacaggcatgcgccaccatgccaggctaattttgtatttttacaaaattaaagagatggggtttctccatgttggtcaggcaggtcttgaactcctggccttaggtgatctgcccactttggcctcccaaactgctgggattacaggtttgagccactgcacctggccttggagaattcttaaaccactgtagcagtatagttcaacgatagtaaaagggggttttagtctctggatcctgccattcaaaagcaaataggccggttgcggtgcctcacgcctgtaatcccagcactttgggaggtcgaggtgggcagatcacttgaggtcagcagttcgagaccagcctggacaacatggtgaaatcctgtctctactaaaaatacaaaaattagctgggcgtgatggcatgtgcctgtaatcccagctactaaggaggctgaggcaggagaatcgcttgaacacgggaggttgtggtgagctgagtttgttccactgcactccagcctgggcaacagagcgagactctgcctcaaaaaaaaaaaaaaaaaaaattgagatagcctcactctgtgttgcccaggatggagggatggagtgcagtggcgcgatctcagctcactgcaacctccgcctcccgtgttcaagcgattctcctgcctcagcctccaggtagctgggattacaggtgcctgccaccacacctggctaattttttttttttttttttaatagagacggggtttcaccatgttggccaggctggtctcgaactcctgaccttgtgatctgcccacctcagcctcccaaagcgctgggattacaggtgtgagccactgtgcctagcctcaaaaaaaatttttttttaaaggccagatatctccacaggtagcttactttatgttatggaaagtgccaatttactgagcaccaaatgaatacataatggagtattcttcatgtagattaaataatgtgaccatactctccctctttcccctccagcccacttttccctttaaataatgaagccctcaaaatcatatttggaaaaaagcacggatcacagattgttcctggggttttgtgttccttttctcccaggcttgtccttaaccttgtctacataaacctgtcaatttattgagacctgtctcagatactttttggtttacaaattgtttgactgaattgaggaaggacggtccttgtcccaccagccctcacaaacctggaatctggtacaaagtgctccccaaagatacagctgcaggagattgtgcaaatgtgcaatgtttccagttacctcgcaggcatttaaggttggtgactggcagtgagaaaggagaatagggaaaatgaggcagaagaatagcaaagggaattaaaagttggataaagggtaaaatacgtaaaagcagagagcagaagcaaggtgaaagggcacccgccccttcttgctcacccagcaagaagcaagataaatggcagaagctgaggagacaaaacaaaaggaagattaaaaactgagtaaaggccgggcacagtggctcacacccaacactttgggaggctgaggcaggcggatcacgaggtcaggagatcgagaccatcctggctaacacagtgaaaccccgtctctactaaaaatacaaaaaaattagccgagggtggtggggggcgcctgtagtccctgttactcgggaggcggctgaggcaggacaacggcgtgaacccgggaggcggagcttgccgtgagcccagatcacgccactgcactccagcctgggcgacagagcgagactccataaataaataaataaataaataaataaaattaaaaaaaaaacagtaaaaatcccacggccggggaaatcaggaccaaaccagtaaggagcagctctttaggcataagcacgcgcattaaagacaaaaagtatccttaacatgataaggataaccagctcattagcgctcatgcatatggacggcatatcatgaatggaggcggctctcaagcacacaggggccaaagtaagcaacacacctatcattcaaaaaggtagacactggctagatattaggcagccttgggaagagaaaaaaagcctggccaataaggtgaaaccccatctctactaaaagtacaaaaattagccgggcgtggtggcgggcgcctgtaatcccagctacttactcgggaggctgaggcaggagaatcgcttgaacccggaaggcggaggttgcggtgagccggcaccgcgccattgcactccagcctgtgcaacagagcgagactacgtctcagaaaaaaaaaaaaaaaaagacccaaactataccaagctggggctgatcttatctcgcagaggtcagtccgctctccccactccgagagtggaatactgtgcttaataaacttgcagctttgccatctctgtgtgtctggtccaaatctttcttcaggacaccaagagcctggaactgtccggcaccatgcggtaacagcagctgttgggcagcgtagagtctactctaggatcaagcttcgcctactgactggagtccgtatcccgggggaacgcgatggccagagggaagaggtgagccaaatgctcaccaagcccagccctgaatgaacccagggggtcagaagggatgactgcagaactcgtcccccacccccaccctccgcccttgctcctagttgccgctgcaagaggcttcgggctcaggatcaggagcttacccctactcccgggaccctctggcgtccccaccatgtgaccgagtctccctgcaacaaacaatgacttcaaacgagctgggcgccggcgcctgacctctgactctcgctccacgccccttccctggccacaaacccgccgaggcccccctctctacccggcgcgcctaccacaggcgcgacacctgtcaagccttgggacaccgaaaccgtacctgggaacagcaaacacaccacagactgcagacccggaagaacttgtcccagtgttgaccacaccccctggctaggggcagggcttccggcctcgaactttaacttccgcttccggttcctagcgttaactgcgaccggggttcagcgctcgggtgaggagctggtggcgtcggcaggttcgaggcgattcgaggtgagggggtcaagcggagaggctcggagtcggagaaagctgtcgcgacccagccacccagggtctggggtcggtgggaggtgaggccagggagttttgtggcagggctttcaggcggcgagaaggggcggaggcgcggctccccggggttcgcggccctgggacaggggacttggggcctgggagtattcgagtccggggggttgggggcagaacggaaggctcagtaacctggaattttagggcctgggactgggagacttgtaggctggggcttctgggcctgggagacgcctgaagctctgactttgctgcctcccacccaccccccgctttgtgtagctccagctaggatgatcgaggttgtttgcaacgaccgtctggggaagaaggtccgcgttaaatgcaagtatccactggcagccgagaggcagtggtacccgcaggggtgcttggcgtgaggcaggcaactcaatctgtgttgtcggatggttttagttaaacccgggagagggggcggatggggtcctggcagatggtattctgccctagaatgtcctcttcctcgttctaccgcttccatttgccttaactgctctgcgcccagcacggatgataccatcggggaccttaagaagctgattgcagcccaaactggtacccgttggaacaagattgtcctgaagaagtggtgagtgcagcggtagagccactgggtggactggactaggccggaaggttttggttgggggagcgctgcaggcagccctttgcttaggcttggctacctcatttggcctacagactgaagagcctccttagccttatctctgaaatgtctctttttcttaggtacacgatttttaaggaccacgtgtctctgggggactgtatcctttgtgtgactttttgaggaagcatctacatacccagcctcggttatctgttcaaaactaaagtctgcatgagcttatgcatattaagtgtttaacttaatacgtggcacatggtgagcacttagaaaatgggagctaggtaattatttggttggggaggagagtggttggtgaaatagtttgacttcaagttcaaaatatttattactgacctccacctgagtgctggacagtaggtcagggtggggtgagactcaggcatatctattgtgcaaaaggagcagaaactttttacaatttttattttatttatttatttttttgagacagtctggctctgtcgcccaggctggagtgcagtggcacgatcttgacccactgcaacctccacctcccgggttcaagcaattctgcctcagcttcccaagtagctgggattacaggtgtgtgccaccactccctgctagtttttgtatttttagtagagatgaggttccaccatgtatgccaggctagtctcaaactcctggcctcaagtgatcctcccgcctcggcctcccaaagtgctgggattatagccgtgagccactgtgcctggcctagaaggaacagaaacttttttttttttttttgagatggagttttgctcttgttgcccaggctggagtgcagtggtacaatcttggctcactgcagcctctacctcccaggtttaagcgattttcctgtctcagccttccaagtagctgggattacaggtgcccaccaccacacccagctaactttttgtatttttagtagagacagggtttcatcgtgttggccaggctggtctcaaactcctgacgtcaagtgagccacctgcttcgtcctctcaaagtgctgggattacaggtgtgagccactgcacccagccagaaattcttttgtaaagttttggttctctccaaataaaaatggcctggtccaaaatgggcttccttagccctgggctgagacctcaggccacctgacccggctgtgaatggatgagaggggtggggacggaagtcagagtcaggattccttaacacctttccttcagatgaaatccacgatgggatgaacctggagctttattatcaatagatgagaatcctcatcttcctgccccgctttcctctcccatcctcatcccccacactgggatagatgcttgtttgtaaaaactcaccttaataaagacttagatgttgctttgttgttgtctctgtatgacagctgtctagtgatgggtggatcagtcgctgtttggtcatcactgcaccatcagcatgcagctgctaaaataagagctctgatcaactggatccatgagggcagagtagaccagcaggctgggagtctgtgtgggagcccagagagagctctggggtttgctgtgggtgtctgaaggtcaagagactctgggattattgtcaccctaataaaccaaagaacctccggctaatgacagtagatgtaattgttaggaattcagattctgaaatcacacagaccatgtgtggaatgtcagctctgccaccaagcagctgagtgacactaggcaaaattttttaacctctgtaagcctttacttccttatccactggaaataattgcgtttacttcatgtctgctttcaatcggcatattgtgaggaggtataaatgagtttaaagcatgtttaaacatccacagttcctggcattttttttttttctttttttgagacaggatcttgctctgtcacccaggctggaatgcagtggtatgttcatagcccactgcagccctgaactggactcaacacagtcctcctgcatcagcctcccaagtagctgggcagtgtgtaccaccacgccagctaattttaaaattattattattatttattttatttgagacagagtctcgctctgtcacccaggctggagtgcagtggcacgatctcagctcactgcaacctctgcctcctgggttcaagcaattctcctgcctcacctgaggcaggagactgggactacaggcgtgccccatgacaccagttaatttttgtatttttagtagagatggggtttcaccatgttggccaggctggtctcaaactgctgacctcaagtggtccaccctcctcggcctcccaaagtgctgggattacaggcgtgagccaccgcgtctggcattttgaaattttttgtacagacagggtctcccctatgttgcccaaaatagtcttgaactcctgacctcaggtgatcctccagccttggcctcccaaagtactgagattataggcacaagccatcatgcctggccctagcacttcttttcaagacaaaacgtgatagtagacagtgaggcagtgtggcactataagtgtggctacatgatcccagcctcaagagtcagaccgactagatttgaattttgattgatccttagcagtgggatttcagcctctgcgaccctcagtttcatcctctaaaaatgagcactacagtggcacccacatctcaatgagaccacgcaattagaatagcaggatgcctggcacataatgttatttgctgtattcttcctctaggtgtgagtagacaggagaccaactgtccctctgttcccctggccacagttctttgtgtcaaccttgctcctgtcctgttttattttttaaattaaaaaaattttttttttgagatggagtttcacacttgttgcccaggctggagtgcaatggcatgatctcagctcactgtaaaccccgcctcctgggttcatgtgatttttttgcctcagcctcctgagtagctggaattacaggtgcatgccaccacacccagctaattttttttagtagagacagggtttcaccatgttacccatgatggtcttgatttcctgacttcatgatccgttcacctcagcttcccaaattgctgggattacaggtgtcagccactgcgcccggccctgaatttcttatttcttataccactcctcccaccagtggtgggcattaatacatttgagtgactctagaaactttctggaataacctagagtttttatcatacggggataattatatgtcccgtaatatttatatgacattccatagtttgcttttctgtgcttttttttaattattattttttattattattttttgagatggagttttgctctttttgcccaggctagagtgcaatggtgcaatctcggctcactgcaacctctgcctcccgggttcaagcgattctcctgcctcagcctcccaagtagctgggactacaggcacgagccaccacacctggctaattttttgtatttccagcagagacaaggtttcaccatgttggccaggctggtctcaaacacctgagctcaagtgatccgcccgcctcagcctcccaaggtgctgggattataggtgtgagccgttgggccagccatgatttagcaattttgaaactacttttgtgtgtgtgggtgtgggcacatgggcccatgtaatacacacaaacagggttgaacaaataagtaaacttgtagataatgagagctgggtgtctcactgtggagaaggaagttacaaataaaacaggagatgggaatgcttaaaatgaaccttgtaggactggatttggaggcatcagtctgaattcatggttttcgtttaacagatatattgatacatatagatgtgtgtatacatatgtatatttccttgctctatccacttagagggaccagaaacagtgacactccaggaacagtgagcacccatcctggaacataaaaacactagtgggaaaacaggattggggggaatttgtggtttagttaatagtattatattgatattggtttcttagtgttgataattatattatagcagggtttctaagctttggcattgttgacttttttgggttggattttttttttttttttttttttttgagacaggctggagtgcagtggcacgatcttggctcactgaaagctccactccaggggttcaagcaattctccgcctcagcctcccgagtagctgggattacatgcgcccgccaccacacctaattttcgtatttttagtagagatgggttttcaccatcttggccaggctggtcttgaactcctgacctcttgatccacccaccttggcctcccaaagtggtgggattacaggcgtgagccaccgcacccagccttttatttttatttatttatttattttttgagacagagtctccctctgtcacccaggctagagtgctgtggcaagattatggctaattgcagcctcttaactcctagactcaagagatcctcccacctcagcctcccaagtagctgggattacaggcacgtgccaccacacccagtgaattatttttgtagagatagggtcttgccatgttgcccaggctggtccccaactctgggctcaagcgatcctcctgccttgggctcccaaagccctggattacaggtgtgagccaccacactcagcccttggattggataattcttttggtgggggctgtgccttgaaggatgttagcagcatccttggcatctaatactaaatgccagtagccagtagtatctcctgttccaaaatgtctgaaggtgttgtaacaaccaaaaatgtatcaagatgttgccaaatgtcccttgggaaacaaaatcgctactggttgagaattctgttctattgtttatttaagacgctaatattagggaagtttgggtgaagggtacatgaaaaccctactgtttttgtaactgcccatgtctaaaattatctttataaaaagtatctttttaatattatgctaatacttgtaaaaaatgttctattaaaacttaaactttttttgttttttgagatggagtctcgctctgtcacctacgctggagtgcagtggtgcgatctcggctcactgcaacctccgccttccaggttcaagtaattctcctgtctcaaccacccgagtagctggaattaaaggtgcccactatcacgcctggctaatttttgtatttttagtaaagacagggtttcaccatgttggccaggctggtctcgaactcctgacttcaggttatccacccacctcggccttccaaagtgctgggattacaggtgtgagccaccgagcctggcttgagtgctttatgtggattaatttatttaatgttcacatcaaacagaaggatgtaattgcttatccccgctttgcagattgggaaaccgaagtacagagtaacgttaagtaatcagttcaaggtcgcatagcaagtgtcagtcccaggctttaaacccaagtctggctccagacttctcttagccttctactgcatcctgcgtctaatttgttgtgggcaggtttccctatgagttcacttcactgagcctcattctttttaacggtcacatagggttctatgctaggtgaactgtagttgcaccctttgctgtcagtgtcttcaactcccatatctacccacagttccccaactctgggtccccaaatacctcccctgtgtcccacgggctctgcagactctattttaagttggctaaaactgagcccatctcctcccacctgcacctcctccgtgttcttatatgaatgtcaatgtcggcacccactggtcacccaggatggaggaaggagccagactgcgagggaataaaggaagtaagcaggttccaaaggacgtggaaggcctttgggtccagagcctagggaaaagttgagccctgcaaaaaataaaagaggctgggttagctttggacatctgtgggaaacaggtgggaagagggaggatggaggagccaaatttaagcatcgggtacttaggtgctcatctccaaggcaactgcattgctatggcaacagcagaggcagcaccgccccgcccaagtacctcctggaccgccgttacctctgcaccagccagactcttccgcatgggagggctgggggcttgcggacctccgggaacagctcaggcaggcgggagttgctgcggcattagccaatccataagctctatcccgcctgggtgggctctgcggcgacgcgcgccaagaaggggtcgggagttttttggcgctcgctaaagggcgttgagaagggcgggcccgcgtcgcttcggaccactcaggagccgaggagagcgagtgggcggggccaggctgaggctggccgggggcggggcgcagggataacgtgggagggtccgcccagcctttcttctacccaatagaaggccagaaagccaatccggaccgttagggagcccaatgggcgtcgccgccaggccccgttgcagagcgcgtctagccaataggcagcggcggcgggcgggcgcgggcgacaggcggcgcagctgaggcggagcaggcgctgcggcaggagggaagatggcggacgaggagaagctgccgcccggctgggagaagcgcatgagccgcagctcaggtgccgcgggggtcggggctggggcgggactgcgcgggcccgcgtaagcagggctcgagctcgccccttgggcgcggcggcagcgctgcctccctcccatggggtcctggctcttccgcgtcgtccccggggtaacggccccggcccgccctgttgtggggactgcgagcctcaggagccgccgggaagcctgaggaagctgaggcagggggctgggcgggtgagggtccggggagtccggggcgatggccctggccctgccggcccggctgatacctctcggcctaatgcacctgacaccccgggggacgtctctgcaccttgctgggcccgggggcacccctgggagggagacaccccagtaccctgcaaagggcgtagggtgttgcccggcctcgggtccacaacctacccctgctaacacccctactgtgtacacctaatgctgagtctgcgacatcgcccgtgacattctgccagacgatggcccctgtgcttaggcccgatttaagggttagccacaatgataatattgccagtaacagggcatgtttttctctgtgtcaagcgctttaagttctctctgaattgccgcaactctgggagccaggtagttattacttccaccttaccagcaaggaaactgaggtcagaaaactgaaggaactcgtccaagatcattcatttcaggggccgggggttggattaggacctaggcagtttgcctacaaatccccctccccgtgtcactgcaaactcctgaggagcaggcccagcatctgtgggcaggtcccgagtcactctgctgcctctagagcccatagcaatcgcatttgcaataataattctccttggttgagtgccaggttctggtgaactgtttggatacatggactctcctcattaaccccatgaggtttgatctccttattctctattccccatttttcagatgagaaaactgaggtgcagggagattagagcccattgccaaggttttagagtgagtcagtagctcagctgcatttgcacctggaacccgcgctctcgcccaccctgctctagccctggcctgtggctgggacctccagcataaaccggatgctctgcccagctctgggcccatttctgctgtttctgctcagttcaaccctgatggcttcctttatgggtgacactccatgtcacccaggcgaactgtcagcctttggagtggcacccagtagggtctttacttccagtttcttgttcacagtcttcactccttcatacccctcactccctgggtaacatcgggccaccagtaatgctggttcctagctctgcaacaccatgcacggtgtagtagctaagagcagagctttcgggtgtgaagtacctgagtacagttcctgccttcccctgtgtgtgcctggaacagagtaaacactcaggaagcgttacccactgctgccattcccagagatgcaaaaggtgaggtctccgttttgccatctatacaatagagataataaaggctatcccactcttaatgtgtgccagtttctgtcctaggcattttgtagatgtgtgagcttatttagtgctttcttattattatttttggagatggtctcactgtgtggctcaggctgcagtgcagcctctgcctcccaggcttaagcaatcctcccacctcagcctttcaagtagctgagaccacaggcgtgtaccacccacccatggctaattttttattttttattttttattgtttgtttgtttgttttgagacagaatctcactctgtcacccaggctggagtgcagtggcatgatcttggcgcactgcaacctctgcctcccgggttcaagtgattctcctgcctcagcctcccgagtagctgggattacaggtgcctgccaccacgtctggctaatttttgtatttttagtagagacgaggtttcaccatgttggccaggctggtctcgagctcctaacctcaggtgatccacctgcctcagcctcccaaagtgctgggattacaggcctgagccactgcgcccagccagcctgttgtttttgtttttgttttgagacaagagtctcactctatcgctcaggctggagtgcagtggcatgatcttggctcactgtagcctccaccttccagattcaagcaattctcctgcctcagcctcccgagtagctgggattacagacatacaccacaacgcccggctaatgttggtttgtttgtttgtttgtgacggagttttgctcttgttgcccaggctggagtgcagtggcacaatctcagctcactgcaacctccatctcccgggttcaagcgattctcctgcttcagcctccccagtagctgggattacaggtgcctgccaccatgccgggctaattttttatatttttagtagagatggggtttcactgtgttggccaggctggtcttgaactcctgacctcaggtgatccaccccaccttggcctcccaaagtgctgggattacaggtgagagccaccgtgcttagcccttttaaaaatgtttaaaaattattatttagtcctttcaatgaccctaaggtaggaactgttatctccattttgcaggtgagaacaccaaggcccagggaagatatatcacatttgaacccagattcagatttgaatccaggtggcctggctgctgagtgcatggtttgagtcactccctgtcccccagcttcctctgttccatcactctgggttattttcctccttgaagttatcagggattgatactatcctgtgtttcatttgcttgtttagcacctgtctgctctcacctagaatgttagctctctaagggcagggactgtatcctgccacattggcccacgtctggagagcctgtggcacatggtggatacaccatggatttgttgaatgaaggcgccccctgcaagccaggccctcaccctggcttctggctgtgggcccaggggtgtcctgggagcacaaccctagctgaattcctgcctgccctcccctccaggccgagtgtactacttcaaccacatcactaacgccagccagtgggagcggcccagcggcaacagcagcagtggtggcaaaaacgggcagggggagcctgccagggtccgctgctcgcacctgctggtgaagcacagccagtcacggcggccctcgtcctggcggcaggagaagatcacccggaccaaggaggaggccctggagctgatcaacggtgagcagggcgagggcaggggcttgggagggggtcttctcccaggtgagcctttgtagaagtcacatcagacccttcaccccagcttgctcagctgccaggcgtggtgttggccaacacaaaaacgccagtgcatgacctgaccctgaccttcacagcagccattctctttcttttccatctggcatttgagggtgagccaggtaggggcagaggacccagcctgggggctggcagacatgggttcaggtagtagctgtgcctctgtgaactctgtgacctttgggaggggactcgtgtcacctcccctagactcagctttctctgtaaaatgggcatcctctaaggaccattgtgaaggttcaagggaataaggcaatggattttgcacagtaggccctcagtctgtgggaagtgttgtcaatagtaatatcatccactaggggcctgagtcataaacataggtggatccagagagagcagtcaggaaggtagtgagtgcatgcagggtgcggtggctcacgcctgtaatcccagcactttgggaggccttggagggcagatcacctgaggtcaggagttcaagattagcctgggcagtatggtgaaactccatctctactaaaaatacaaagattagccagatgtgttgacgcatgcctgtaatcccagctactcgggaggctgaggcagggaggcagaggttgcagtgagccgagatcgcaccactccactccagcctgggcagcaaagtgaggcaccatctcaaaaaaaaaaaaaaaaaagaggtagtgagtgccagtagatagtgagttaattctgacctaagggaggaagctattccctgctctgttctgtgtttcctctgcagtctggcaccaaggtggcaaactttaaaggccagatggtaaatattttaggttttgtgggccatgcagtctctatcagctctgctttgtaactggatagcactcataactaatatgtaagcaagcacatggtcatggctgtgtgccaagaaaactttactatttacaaaatctgggaggatttggcctgcaggccatcatttgcagagccctgtctaaagctgtccagtttggctgccactcccaccctgtgcgggaggatcacttgagcccaggagtttgagaccagcttgggcaacatagcaaaaccccgtctctaaaaaaataaaaaaattagctggacatggtggtgcacgcctgtagtgtcagctacttagaagactgaggtgggaggatcctttgagcccaggaggcagaggttgtaatgagccgagatcacactaccgcactccagcctgggtgacagagcaagaccctgtctcaaaaataaataagataatatcaaaaattggtttctcaattgcactggtcatactttagctggtggctgccatctttgacagcgggaatataaaacatttacattcttggccgggcgcggtggctcacgtctgtaattccagcactttgggaggccaaggtgggtggatcacgaagtcaggagatcgagaccatcctggctaacacggtgaaaccctgtctttactgaaaatccaaaaaaattagtctggcatggtggcgggcacctgtagtcccagctactcgggagataggcaggagaatggcatgaacccgggaggtggagcttgcagtgagctgagatcgtgccactgcactccagcctcggcaacagagcgagactccgtctcaaaaaaacaaaaacaaaaacaaaaaaaaacacttttccattcttgcagtaagttgtgtctgatgcctttctcagagtccccaaacctgggctgtccctactccaaacaacccatctctcaaccatgcccagacagcctgggttgctatgcagctctgccacgtcctggctatgtgctcttgagcaagttacttaacatctctgggcttcaatctttttctccttcttcttttgagacagggtcttgctctgtcacccaggctggagtgcagtgttcatagctcactgcagcctcaacctccttgggatcaggtgatcctcccacctcagcctcccaagtagctgggactgcaggctcataacaccacacctggctgatttttgtatttttagtagagacaggacttcaccatgttgcctaggatggtctcaaactcctggcctcaagtgatccttccacctcagcctcccgaagtgttgggatgacaagcatgaaccaccgcccccagctgtcagtctttttcatttataaaattagtattagaataataagacccacttcacagggtagttgtgaggactcctggctaatacagtaaagcgggagtaacagctcctggcatcggtaaatgttctgtcattgttagtggtcactgtcattgctgttgttggttgtggtagcacagggcccagcacagagtgtacactcggtcagtattggctgttgttttactctctcatcacttggtccagttggcctgtaggatgttattacatatgcacacccccaacatggcatctaggacagtaagtgccacccgttagtcttatatgtaagcatggcagagagaagccgagttcttgcacagaatcttgaaggctgattgaagagccagcctcctgacctctgagggcagggactggatctctctctttcccctgtattcccatcctgccacacaaagcctggcccagagtcagccctcacagccttgtttcatgagccagtaggaagcaagaaggattcctggcacaggacggggcagaagtaaaggcctaggactaggatgtagccagaactctggggaaggctttgcagggagctagggggtgatgagacccttcacgggcaggtcccagccaggttgaggagggtccttgtcaggtgaggaggtttggttctttcctggaggcagcaggacatatgtggccatgtgggaccaggagaggaacccacagtgctctgctttcagcagagatctgtgaagctagaatgtcaagggccagggaagtggaaggcccagaaccttcaggggttctggttgccccagagcaagaagaagaagtggagggagaagccaggagagaattgcaagatgacccttcaggtcctcccagctctagtggtctctgttctgaggcttccggaccctataagagtgagcaggagggtgcaggcatttggggatggagcggcatgaagtgggctcctgggggtcagcagagcagccaggcgcaggacagagctgctccaagcaatcctgatgagagctggcagaaggctgaggtcggtggggatagtgaggagggcatgggtctgggtgtggtgggcgagggtgtctcgcccatctctgggttggacaggtgcacctggtaagtagccaggccctgaggcgtcaccgtaggtacctgcagattctggaatgtcagcaggagccttgcctgcccacctggtggaagctgtgggaggaattggagcaagaggcggtgtgacttgaacttgggggctggaagtggaagaagaagtgagagggagcagacccgagagagattcaggaggcaggatagagaggactgggtgatggattaggtgggcaagggtgggatgtctgggggagggtcagggcagaacagcgtggcccaccctgggctcgtacagggctggatttcagtgccagctgtgtggtcttcatttcctgagcctcagttgcctcatctgtagaatggggagagggtggctatgaggatccaggagctatgggctcagtggctggcgtgctctgcacggtggagcctcagccccagtcattggggtgtggacgatgggggagctgaggtcaagtcaaggcctctgctcacgggcagcccctgctgccaccccacagcccgtagaaagagttccggataggaccacaggaggcctggtgggctcagcacacagatgatgaccttggcacacgacctccctctcctggtatcctcctgcctgagacggtgctggggcagatctcctcagaggtcgataggaggatgcagtgaggtggccccggccgaggtacactcggtaacagatcatcatgtgcagtgtcggcgcaggcattgggcacctgggcctcattttctcttccatgaagtggatgttctcccctcgagggttcatgccgggtgatcaggagaccatgatttgggcagctcactccccagctggcagccgggctaaatctcatcagtgcccatttagatctggtgctccgcccttgccccgaagggacaggctgcctgcagagagagccgggacctccacattttctgctgaggctccttttcccagcattggctcctctgcagctgctgggccacagccagaggctgtcagagatccaagggagtcattgccagtgtccttgtctaaggaggatgggccatggagaagccctccctgcccgctctccacccagatctgttgacagccacccctcacatgcccagggcctggagggtcccagcaaggctgagactatgagcagctgtcctactcacatacccatcccagcatccaggtcagcccctttgtcctggggtcctcaaggtcactggcgcccttccagcctgctggccttgggccagcctctagcccctccttctggatcttggtcttctcagatctgaccctgtcacctctttccccgaccaggccccttcccctctggtgcctgggcagcctgggggaagtatgctggaagcagcgtaatgatctggcaaggcagaggagacagcacgtcttgaaacatttttggggtcaaggactaccccatttgttccctcactcccacctaggtcactgatgtgcattagcttggactgttgtaacaaaatatcacagacagtgtggcttaaacaacagtcatcactttccacagttctggaggccagaagtccacaatccaggttccctcagattctgttcctggcgagaacccacttcctggcttgtagacggctgccctctcactgtgcactcacatggcattccccaggcgcatgtgcacggagtgaaggagcacgagctctctggtgtctcttataaggacactaatcctggccaggcgcagtggctcatgcctgtaatcccagcactttgggagactgaggtgggtggatcacctgaggtcaggaattcaagaccagcctggccaacatggtaaaactccatctctactaaaaatactaaaaaaaaagccagatgtagtggcgcacacctgtgatcccagctactcaggaggctgaggcaggaggatcgctggaacctgggaggcagaggtcacagtgagccgagattgtaccactgcactccagcctgggtgacagagccagattctgcctcaaaaaaaaaaggggcgctaatcctgttggatcagggccccacccttatgacctcatttaaccctagttacttccccaaagtccccatctccagatgcagccacactggaggttagggctttaacacatgaatttggggtgacacaaacattgagtccataacggatgggcagcttggatctgtcaggggcctgctctgcaacagccactgcttaagcggtcactgattcactccttggaacaggctccaacgtgggagcagcggttaccccattttacaggccagttgagtgaggctccaagaggtaaagtcacctgccagactctcattgttcaggagcagcagaggtaggatctggacctgatggagtctggagtcagcacccataacatgtcctcctggaccttggggatacactgtgagcaggctggctggggtctgccagcacagataggtgccattctgttttgcatactatttcagggggtcctgaacaccttgaagcaggtggaggcccctgctccagactgggagctcctggagaggccaccctgtgtctgtgtggttctaagctggagccacatcgaatcaggatggggctccagcacccgacagtccccatcaaatttcacaggttttggcgccgtcgggcaaggctgacacattgtcttggaggaggcccaggaagtctggccttagggtcgcagcctgagtttcaggcagatagggcatgagattccagcatttctgcttcgagccccgtggtagatccctgtctccctccttccccatggcctatttctgtctcatttattcattaacttcttgaacattcgtgaacacctgttttgtgcacagtgctgggttctgagggtgcagcaatgaagaaggccaacccagcagcctccattcctgcactgtgaggcgggcaagcaacacaccaatgggacggtagtaaatgcagcacccagggggaggcacctaacacagtgggggattaggggaggcttcttggggagaccagaggatagctgatgagtttcaggcaggacaagaggcttaaaccaaggtctgcgaggtgggagtcggaggatgtcattgtcgcggggtcaggtacaggctgagctaacaagacacacaggaccaaacccctcaaggtcagcctcacagagcaggaactcaggaagaaagcgtttttgtttgtttgtttgtttgtttgtttgtttgtttgaaatggagtttcgctcttgttgcccacgctggagtgcagtggcaacgatctcagctcactgtaccttctacctcccagtttcaagagaaagcgtttttttgtttgtttgtttgtttgtttgtttgtttgaaatggagtttcgctcttgttgcccacgctggagtgcagtggcaacgatctcagctcactgtacctttctacctcccaggttcaagagaaagcgttttaaaaaaaaaaatcattccagctacttgcgaggctgaggcaagaggattgctgcagcccaggggtttgaggccagcctgaacaataaagtgcgaccccatctctgcaaaaggaaaacaaaaacagtcattgcaggctcccatcatagcagaaaattttccaagagagctggcaggtcagaggcagatctgggtgatatgagctattggtgtgccaaagtgtggcttttatttgtttttaagtggtatggcttgcacactatgtgtgtgagagaggacaacttgggcgggctgtccaatttcagggatccctgtggctgtgtccccagccctggccgctgggggctgtggcaaggtgatgcttgttcagggcctgggcctggctcctcagacgctcagtgcctgcaggcagtcctgcttccccgaagtaggtgggtacctctgggggcaccgtgcgatcccctggctggcttagtggtccagacagaaggggggacaggggactccagtgctctgtgcctaaggccaaggagatacctagaagttcagggagaggaggggtgggagggggtcctagcaacatctggtttaagtcggagtcactggtggatgtgtctggcacagaggaggaccccgtggcagccctggaagcggggcattctgatcaaaccagggcatcacgggcagaagcctctgtaatgtgccatcccaacagaagctggggccctgtatggcatcgatgtccctgtcagaccaggacacgtgggccggcagggccaaggatagggagagcagagcagtagaggctgcgtcatccctgggatgcagtccccatggaggggaagaatgatgacagcaagggacgttggtcagggtcctgctcggtgccgggcactatgctgcatgtcacagccactggcacaagactgtcaggcggaggggcacagggatgtcagggcagcaggtcgtggtgacatccagctcagataccaggacactggtggctgccatgacgtgcagccaaacagggagctatggctgtgctctcacggtggtaccatttccactgcagtcccaagcaggttagagcgtgaggccgaggggccctggggacacttggatcagtccagtgtgttcagcaggtgccacggttgggtgtccaggcctcccagcactggctaggtcacccagcagtgttcccgtgggtctccaacaggctccaggccagtgtatcagctatgtatgtcctgggcaagttggccggcaggtgtgtcatggcatcatttaggtcagaaggagcaagggtagaagtgtcagggtgacattaagaaaccccctactgagtgtgtcagggtgaccttcacgttggagagaagaactggtgtccctggagagtggctgccaggccttagggtacacggggcgggtgcagttcacccagagggctgccctggcttgctggggctgtcgcaccactggcctagggaggacactggaagggacgcccgtttgtgtcagagcaagaggattggggtagggcaggctttggcccatgggcaccttcctgggggtggcctggagtcaggaaggcggtagccattcctcctgacctggcacgtgcacaagactgcatacacacacttgctcacacacagtcacaccacacacaccacgtgcacacacacgcagccctccccacttggcttccgaaacgtgagtcactcagatgctactctgctgccgtcttgccccctctgctggcagccctgttcctcctaactccaccagccctggcctcctccgcctcctggagagtcagagccgatgggctagtttgggccacacagggtggggccaccctgagttctgccagcatgcagactgtaggtggggagccgggagaagagctatgttgcctgcctctgggaccctggggctacagcccacgagtgtcccttgcagagcccaccagggtgccttggaggcccatcccagtgccaggctgttcttcccagatgggacagctggggccacaggctgccgtggcagtgctgggctttctctggacagctctcccacctctgcccagggggcccggggggccagccccctgcctgggtcagcctctccctgcctgctgctctcctctggcccatccagcttgtatgtagattttccctcacgtgtgtgtgtgtgtgtgcatgtgtgtgtgctggtgagagtgacagcgggagcagggatgtgagacctgcagggtggcagggctcatggatgactggcggggtgcattaagtgctcatgctcgtgaaaggcacctcttcttgggtgtgggtgaggacaggtgtgactgcgcatgcaggtatgtgtgaggagaggggttgtggggagcatgtgcgcctgtgaggggaggctttccaactgaagtgctgcctcccccgctggccagctctggagtcctccatcctgtctggtcaggccccccccaacccctgacctggcactcccattccgttccatgtccacaggctacatccagaagatcaagtcgggagaggaggactttgagtctctggcctcacagttcagcgactgcagctcagccaaggccaggggagacctgggtgccttcagcagaggtgcgcaaggaatgggcctcaccaggttgggggacccttaccaccctgaggggtagaggccaggagggtctgggcattgggctcccaggtgccacaccggccttcggggtccagcaggtggcagcacagccccttcctcaggcttcagaggctgctctgctgggcagggccagggccacacagggaggggggctgcagcactttcttcctggcatcatctctaccctggggggcatggtctcttgtgtgtctgtgcacagatgtcctcatcccaggcccaccaaggtgggtacatcctgtcctctgcctcttcctttttgtggtttaaggttgagggccctgagagtcccagggcctgtcccccagaatccctctcaaaggtggggaaaccaggggtgagaggaggtggccctgagtttaggcctgtctggccaggacagtggaaatcagggacagaggggactaggcctcctcctcttcctcctcttcagtcctcggggtctacagaaaaacatcagggagaggccaggatgggttgcagggtgtggtgtgcaggtgtcttagtggggtggggcggcagcatggggccagcagctgcccacctcctccgaggaggctggtgggacagatgacatggcagggctgggaaccaggcccagggagacgagttcactaccgaagtggcccctaaatgcacggcggcggccgtagccctgcctgctatccttcatgctgtcctcgggcttcccagggcctccttaatggccctgccacccccagctgggccgccgctcagcactggcaataaacatggtgacggatgagtgtggacgagtgtgaggctcagcgcaggcaggagccccatctgtcgcggctgccacccgccctgcctcatcctggcctctgccagcccagccctgacacccccaccgcccctcctggctcccaggtcagatgcagaagccatttgaagacgcctcgtttgcgctgcggacgggggagatgagcgggcccgtgttcacggattccggcatccacatcatcctccgcactgagtgagggtggggagcccaggcctggcctcggggcagggcagggcggctaggccggccagctcccccttgcccgccagccagtggccgaaccccccactccctgccaccgtcacacagtatttattgttcccacaatggctgggagggggcccttccagattgggggccctggggtccccactccctgtccatccccagttggggctgcgaccgccagattctcccttaaggaattgacttcagcaggggtgggaggctcccagacccagggcagtgtggtgggaggggtgttccaaagagaaggcctggtcagcagagccgccccgtgtccccccaggtgctggaggcagactcgagggccgaattgtttctagttaggccacgctcctctgttcagtcgcaaaggtgaacactcatgcggcccagccatgggccctctgagcaactgtgcagcaccctttcacccccaattaaacccagaaccactgctctgctctcctgtgtctcatttctcctcagggaagcatagtggggaagatgtcgtggggaggggatcatagcccccccatcctaagggtcccagctgcaagttctcccccgaggcttccccttgccctgggccagggggagtcacagcagctggctcttggggacatgggcactgtccagctgcccagcaccctgagatctgcttccctgccatctcaggggcttccagaaggttcgtgggtccaacccggcacctggcccagcacccattgcagctgcagttaccatgacaacagggccctcccggactggagggggctcctgcagggagggggatgggagcagacatggcttttagtgcctgaaggtggagcagagggaatcctggggtgggtggcggggagatggggtcccccgccagtgtgggggctgtggatgtggcatgcctgacccccatcccctgttcagtcggggggctgtgggtctgatggagaagtggttattcctgcatgccctgttccccctccacttgatggggaccagcccagattgcgggggtgcctggctggcagagcttagggacctgagcaactaaagcccggccccaggggacctcccctcccccaagcgctgagtttctaataaaggccaagcctcataaacaatcacctgtgcccgctcccatctggctggcttcgggagcaatcgctcattcgcctgctgcctgcctgccggagcatttgtcattaggaaggtttaatgggtttcctctcagctccagagggctggggagagccggctgcatggatacaccgccaggcagaatgttctcccatcgcctggtggaggggggttgggagtgaggcagccatgccaccattcacaccaacagttggatgtggggttggggaagtgactgcacccctcctggaacagtagaggccctgggtctggaaggatcggaaattagtggctggggcccagagggtttgctgagttccactccagggtgaagaatgggctttgtgtcctgaccatcagcagcagggcccagggaaggctgtgcatcgttctgtgtgggagccgctgcccccacccgtgtgtatgtgtgtctgcgtttgcccaagaatgtgtggggccatgtgactggtcgtctctctgtcctgtgcattttgggagtcctccggttctgagagtcctccggttctgagtgtgaccacctgcccctccaggtacccccttcccttgtctgtctgtgcagtggccaaaacccaaatgagaatgtcgctgttaggtaaacatgcctccagagcccacttcggggccggtgattcattattaagcagctgcgcattccctcacctcccacccaccccctcaccccctcctgtctagaaccagggcataaatcccaggcctttaggatggtgacagtgtagtcttccctagtgccacttacaggcacctcccaggccagacccgccccagggggtcagtctctacgtgcccctggcttctgtggccgctgggcagagctggagcaggtcaccttggggtaaacggtattactgccccaggacaggagttggcttcgctgtgcccacgtccatgatgagaggggaagtcagtgagttagcagtggatagccgaagacgcacacagattgatcctggcctgggaaatgttagtctgcctgcccatccttgtttgtaacaaaagccacaaactcaaaaggagctctgagcgtgtgtgtgtgtgtgtgtgtgtgtgtgtgtgtgtgtgtgatctctctgaggacctgatacagatgtgatggacacacccacacccagccctaatctcggtgtgaggatgtggctccccagcactcagcatagtgtggacacagattgtggacctcagcagcctcaattctccaccttactttaggagaatccagtatctaaggccgataaactacctcgtcccctcactgtggagactctctgcctccaaataaatgtgagttgggggggatacagatgttctaggtgtcctggctttgtgctgcttttcatttcttcagcaggtacagggtaaagtgcctctccacatgctaatccgggaattaatcctttttccgatgtcaaacatattcgcttaaatggaaattaattgcttttcttgaggatttctctaaaaattggttttaaatgagtacattaggcagtcccatttattattcgttggtttcgttcccaatatggccccggtatccgagttcccggagatgccagcacggagcggagatgatttaatcagggtaaccattaattagagatgaggagagcctcccccaggaggagtgggagtgccccctttgtggcctcagcagggtggcggtctgggccaatagggctctttaaatgattgtttctgctctggattcaatagggaccaaccactggggtcaacatggggcaggatcacctgggcagcaccccctaccttcattcttggtccctcagccccaagggtgacgctcctcacctttcttgtaccccttccaactagcctggctgcaccccttaggtctgcctcatgcaggccttcagacaggcctggctcgtataaagccctcatctggttcttccccttctgtgacttcccttcccctgcctttagccagatctctaaggctgctgaggacttagcgtctccttttttattttttagattgagacaaggtctcactctgtggcccaggctgcaatgcagtggcactcatggttcatggcagcctcgaactcttgggttcaagagatcctcccacctcagcctcccgagtagctgggactataggcgcacgccaccatgcctggctaattttgtaaaatttttttagagacgaggtcttgctatgttgcccaggctggtcttgaactcctgggctcaagcagtccttccccctcagtctcccaaagtgctgagattacaggcatgagctgctgcatccagcctactcctagttcagtcccttcctgtctccctcatactcttctttcctgcctccaaaacttcttgtcttttcctctccttcccctccaagaattctggtcccccatcaagggctgtccctgcccaatccctcctgcaggcaaacaggctccaggtgtgaggtatgagtgtgttcaattgaaggcacctgagtgcccctttaaaaggctgtttctagcttttttgggattagtttactcggcacaaatgtgacttgtctaaaaacgatttttgaaattacaaagcaacaagagaaaaaagaaaatggaaaaattcagctgggccctactctttcatactcagcttcttaaaagccagctcgattgttaaaaacccattaaaaaattgccagactggccgggctcagtggctcacgcctgtaatcccagcagtttggaaggccgaggggagcggatcacttgagcccaggagttcaagaccaccctggacaacatggcaaaacccccatctctactaaaaacacaaaaattagcctggcatggtggtgcgtgcctgtaatcccagctactcggaaggctcaggcacgcgaatcgtgtgaacctgggaggtggaggttgcagtgagctgagatcatgccactgcactccagcgtgggtgacagagcaagactgtctcaaaaaaaaaaaaaagaaaaaaaaaattccagacctcttagtaatgcatcaacagtgattgcagagtggcaatccagtgacgggagaatactcatttgaggccagttttcattgctgtgctagaattctcggttgttttgatcaaactgcttttaaacgaattgctttcgatcaaaacaactttggattgggtctcctcacccatctccccaaagggctggccctggggaaccccttccccccagttcgcttaagcttgagtcatggaataaggggatcctcactggagatgggtctccaggcttggacttcggggccacctccacctctgtcgccattggacacacacagtcaccgaagcgtcaaatgtcaaaggtcctgtttattccggcaaaccggaaagaaaaagtgtaaataaaaaaagaaacagatccatgcactcaactcctgggggtgggggtgggggtgggagtgagggatgaggaatgggtgggaagcaaggagggaggggtggaaggacagagagagagagacagagagaggcagagacggaaagaactggagaaccagagccataaaaagaaaaagacatccataaaaaggcagaaagaaagaagtggtgtattaaaagcagagatcaataaaggagaagaggggaaattgaaaaaatagacagaaatacataggcagagaacaaaagcccagcaaaaaggcggggagaaagggcgtgacagagacagagagatcacccttgagggacacaggcagaatgaaaagggcccccagcccccagaggccccccaggcagcagcccgagccacagcattggctcaggggtccccagaggtgctgatgacgtgaaacagggtgacattgtagagcacctggtggccgttgttccaggtatagagggcgcgctcccgggggttgtaatccagcatcgagatgtgggaatactggttgtggaagggcacgtccgtgtactcgtaactggacgtgttggtaaaataggcgaagtagaccttggccccagccaggtgggagttggtcacgtagagcacaccgcagatcatgaaggcctcgccagcgctgcgcttggggtagccggtgtcccaggaccgcatgacctcgagggtgtgcgggtccagccggctgaccacgatgttgcccgcgttctggttggtggtgtacacagcccagagcccgctctcgtccaccatgaagtccatgtcggagaagccgccccaggagtaggggaaggtgttgttgtaaccggcgcccgggaggctcctctgcaccagcacagagcgcgagcggaagtggtatttgaccaccacgttgctctggtacttgttatagaacagggagccgttgtacaccacgtggcccgtgcccgcccacggctggggcagcaggtgctggataaagttctggcctttgatgaagtctcccagggtacggaactccaggacccggcggcctttgtaatagccatccatgtaccagacctatggtagcagccgctggtcactggggggaaccaccaccaacgacccaagggtcccagcaccagctacagccattagagttcaacagtcactaagtggtcattagtcatgggaactctgttgaccattcattaccaattatggccctagtgtgaccatgatcatctcctggtgacagcattaaccatgggcagtgaattcaagtgacgtcttatcactcaatggctgtccagtgaccactaaccacccaatatccaatgaccagggaattcctgggcccagtgagtccccaggggctgcagtttcttggggaactgcatggccccagtaggacccaaatcccagtgagtgctattggtcttttttttttttaagtaatttttttttttttttttgagatggagtccctctctgttgcccaggctggagtacagtggcgtgatctcagctcactgcaacctccgcctcccaggttcaagtgattctcctgcctcagcctcctgagtagctgggattacaggcgcatcccaccacacccggctaatttttgtatttttagtagagatggggtttcaccatgttggtcaggctggtctcaaactcccgaccttgtgatccactgtctcagcctcccaaagtgctgggattacaggcatgagccaccacgcctggcctttttttttcttttgaaacaaagtctcactgtttttcccaggctggcgggcagtggcacaatcacggctcactgcagcctcgacctcccaggctcaagcaatcctctcacctcagccccccggaatagcagggactacaggcacaagtcaccacgcccagcttatttattgtatctttagtagagacaaggtctcgcaatgttgcccaggctagtctcaaactcctgagctcaagtgatctgcctgcctcggcctcctaaagtgctgggattacaggcgtgagccactgcacctggccactattgatcttaaaacagaccctaagtggacaatgctccatcccaaaggacccagggaactgcagcccctggggagtcactgggcccaggaattccctggtcattgaatattgggtggttagtggtcactggacagccattgaatgataagacatcacttgaattcactgccatggttaactaacccctgtcaccatgaggtgaccaggcgtgtcatcaacatcattgttgtcatcatgttaactagcatttgttgttgtttttgttttgttttgttttgagacagagtttcactcgtgttgcccaggctgcagtgcaatggtgcgatcttggctcactgcaacctctgcctccagggttcaagtgattctcctgcctcagcctcccgagtagctgggattacaggcatgcaccaccatgtccggctaattttgtatttttagtagagacagggtttctccatgttggtcaggctggtctcgaactcccgacctcaggtgatccgcccacctcagcctcccaaagtgctgggattacaggcatgagccaccatgcccagcctcatggatggttcttgtgtgtctaagtgatgggcagtcatgaccatggaagctactagaagtccgaaggtcactgagcagtgcttggtggaagaggtctcttgtccttgggagggcattggtcattgggtagttacttggacgtcagtagtccctgagaactggtcagtagaactcagtaaccattagccactatacagacactggaggtcaacagagtgggattcacaaggctgcaaagcccttggtcacttgggggttactggacagggaggtccaatggccctgggggatccaggacactttgggctacaagacagtcaccagtgtggactccctaggcacctatgggcagtcaaaggctctgtccctcccaggccctgaccccaggggtgggcgcagtcactcacccggctatccgcactgggggccatcgtgtcagtcatccaggagccgaagcgggaccccatggcccgaacggtgatggggttactgaccccggtcagcttcccacagcctgggaggcaggaacagggggaatgaggatggggaaatgaacagcccaagagaggccaggcaaagatgaagtgctgtgatcaagttgggaaagctgggaccagggatgagggaagactcaaaaatctggtcccaatatgttgttcagttgtgagtgaggggttagaggccaagggtcagggccatttccagcttctggactcaagtgtagccttaggtaggaaggtcaagggttgaggtttaaaagttagaggtcaaaactgtgtccagcttctaggcacaaacaggtgatactggagttgggtgtggcagtcagagatcaggggtcagggtcaagggccaaggcatacccagcttctgggcgcaggcgtggagccgggcctccagggccatcacccgttgctgcaggtcctcatacccgtaggcacccatctcctcctgaatggccgccagactgccggagagattcctcacctcctcccgcaagcgtacaatggtccgcgtgtctgccttgtactgctccaggaccgagctcaggggcaacagttccgtcatcctgtccttcagctcctgtgcatcaagatggaaccatggccaagcctgacccctggcctttgacccagacatgactccaacctctgactcataacttcaccctttgtctttgatgcacacctggcccttgacatgtggctcatattggaccctagattcttcccagacatgactccattgtaggaactaatggataccaaatcccagtcatttgtttgacctctggtctggacacaggaggacccacctggaagctcttggccgagagggacccatcagctgcccggagccgcgcatccaggctccgcatgagggtctccatgccgcgtacatactggaggtcgcgatacgtccgcaactcaaggacctccatggactgggagacgttctggacctaggaatggggacaactgaagggaccagacctccttccccaaatcccaacccagagatgccacagacaagagctggcaggaacagaggctgtacaaacaccacaccgacgaggccaccttctcctcccctgagcttaccagcagcctcccaattgcgtgcccaatccatccatccatcgctccctccctactacccactggctcccatctggtccacctaccaccacctctcacctcctccctagtctcccagttccaccttcatcccctgtagtcaattctctacacagcagacagaaggaactttcaaaacagagattagatcaccttcctcctccacagatcctgtgctggctggtcctgcccaccccccccgcccaacccacttcctctctctttgttctcacagactctaagctccttccttctgcagggtctttgcacttgctggtctctctacctggagtgctgttcccccaagttcccatggctggctccttctcatccttcagggttcagctccagcgtcccccactcaaagcatccttccctgaccaccctgtccggtagccgctcactcactctcctcttgcctggtcatttccttcccagctgtgactatgtagaacattcttatccatctgcctccttcaggtgggaccctcagaggcagaggctgcgtctagcttgtccacagcttaacctccagtgcccagcactggcctggagtagaggcccaataagtattttttggctgaatgagtaaaataaacttcccttgccctggcctctcctgacccaacctgagagcacccagctcccacctccacctggctacggtgaactccacctagataagttgaactccccctggctaaggtagactcccatctgactaaggtgaacatctggctaaggtagccaccttgttaaggtgaactccatctctggcttaagtagactctcacctggctaaggtagactccagctggctaaggtgaacacctggctaaggtagactcccaccttgttaaggtagactctcacttggctaagatgaacacctggctaaggtagaccctcacctggctaaggtagaccctcacctggctaaggtagacctttacctggctaaggtagactctcacctggctaaggtagattcccaccagcttcacctgactaaagtggactctgcctggctaaggtaaactcagtcagagttaccactggatgcttgttgaaatacagactttcctgtacaattattcacatgacacttggaaactcccagaaactcagcagcctaatacccaccctgaacgccacaaaacatttttacatactcttcccttctccacagtttcacgtttcagctacctgaggccaaccacagtccaaaaatattaagtgggaaattccagaaatcaacaatttgtaagttttatttatttatttatttatttatttgagatggagtcttgctctgtcttgcccaggctggagtgcagtggtgccatctcagctcactgcaacctccacctcccgggttcaagcagttctcctgcctcagcctcccgagtaggtgggactacaggcacacaccaccacgcccggctaatttttgtatttttggtagaggctgatctcaaactcctgacctcaagtgatacacatgcctcagcctcccaaagtgctgggattacaggcgtgagctaccacgcccggcccaggggactattttctcttgaccatgatcagaggtagaaggaaacttttataggagcctcttgaggtggagggttagaccctccccaaggggcacagaactccttcttagtaggtgagtctggtgaactgcaaagctgggtgggacatgcctggtggaccagagctcacacacaggagactcagatgctgcccctccagtcttccttccttccccccaccccaatcccagtaagtgcttggcttctctcccaaaaaagcattgaacaggcagggcgcagtggctcacgcctgtaatccccgcactttgggaggccaagacaggcaaatcacctgcagtcaggagttcaagaccagcatgactaatatggtgaaaccccatctctgctaaaaataaaaaaattagctgggcgtggtggcacacgcctgtaatcccagctactcgggaggctgaggcaggagaattgcttgaacctgggaggtggaggttgcggtgagctgagatcgcgccactgcacctgcactccagcctgggcgacagagtgagactgtctcaaggagaaaaaaaaaaaaaatacattgaacagatattggataaagtatccatctgggcatggtggctcacacctgtaatcccaacactttgggaggctgaggcaggaggatcacttgagcccaggagattgagaccagcctgggcaacatagggagaccccgtctccacaaaaaatataaaaattagggcatggtggtgcatgtctgtagtcccagctactcagaggctgaggagtggggattgcttgaacctaggagtttgaggctgcagtgagctgatcatgtcactgcattccagcctgggtaacagagtgagaccctgtgttaaaaggaaaaaaaaaaaaaaaggacctgcctggagaggagctggattatcagccagctctgaataatttgcatagctggatatggccactggctgacctggatggggctggagggcggggtgagaactgggagattttcccagctgcccccagggtacctggaaggttctcaccttctccatcagttgccgcagctcccgactcctgccatctcgagagcaggtactctgcgctgggatcacggccgtgcagatgcatttcccgtcaggggcctgggctgaggtgtacagctgccagccctcttctgggttctggaagagagtctgcaaagaggtgggggtcagagaccggaatcccagtgagggtctcgcctcgccctcactgggacaggaagggggcccaaggaaaccacagatgccctttgctgggctccgggcatatgccagtgcctgttgtgtgtgatctcaggccctccttaaggagcctcatttcacggatggcaagactgaggtgcggagggcttaaggaacacggcaaggaattggaggactcaaatcttctccaagaccagaattcattctctcacacagatttgcacgcacacaacactgtctctgtgactgccattagaacagagatccactcaaataacccccaaacctggacctcctctctgcttccccagcccacagtgacatatcggctctggagctatctcagggccacttaatgtttttttttttttttggtttgttttttgttgttgtttgtttttgagacacagtcttgccctgtcacccaggctggagagcagtggcgcgatctgggctcactgcaacctccgcctgtctccaacacctggcctccactccagcctgggtaacagagtgagaccctgtctcacaaaaaaaaaaggatctcacctcaggtgatccacccgtctcagcctcccaaagtgctggcattacaggcgtgagccaccgtgcccggccatcagggccaccaaatgttaagtgcaaccctgctgtgcccccacctcacctggagccacccaggcaaagtgatggcagacaaaatgctcagataatccagtgaccaattatggctttgtttcccaagccatactccttccaacactggtaatcttaccaggtgtgctgggaaaaggatgctctgtggtcaaataaatgtgtgtcactgggtgaaacaagttttgttactgcaggacttatcagaggcttagaaatgcaaataagtaccagggaactctagacacaaatcataaacttccaaactgattagaagacacccctgaggcaggtggatcacctgaggtcaggagttttgagaacagcctggccaacatggcaaagccccatctctactaaaaatacaaaaattagccaagtatggtggcgggcacctgtaatctcagctacatgggaggctgaggcaggagaatggcttgaacttgggaggcggaggttgcagtgagctgagactgcgccactgcgctccagcctgggcgacagagcaagactccgtctcaaagaaaaaaaaaaaaaaaaaaaaagaagatatccatgagagtctcttctgtcccaggcatagggtctgggataggatcaaggaagagaaggaatgaagaaaacatctggtggttgtccatggagctactaggagagacggacatcaaccacttaatgccagtgatacttctagaaccacatgctgcagtgagtgctttgaagaagtagtgcagggagtaacagggggtcttccctcaggctgagggtctctgaggaggtatccaagagaatgggctcttgagatgaacttgagggacgagtgagacagaagaaaaggagaaggcaggggacatttctatcattacaaatcctgatcaatgtctggagggacccaggaatggtggctcacgcctgtaatcccagaatttcaagaggctgaagggggcggatcactgaaggtcaggagtttaaggccaccctgggcaacataacaagacctcatctatactaaaaattaaaaaaaaaaaaaaattagctggatgtagtggcatgcacctgtggtcccagctactcacaaggctgaggcaggaggattgcttgggtacaggaagttgaggctgcaatgagctatggctgtgccactgcactccagcctgggtgacagagtgagaccccatctcttaaaaaaaacaggccagacgcggtggctcacacctgtaatcctagcactttgggaagtggaggcaggtggatcacctgaggtcaggagttccagaccagcttagccaacatggtaaaaccccgtctctactaaaaatacaaaaattagccgggcatggtgatgtgcgcctataatcccagctacttgggagcctgaggcaggagaatcgcttgaacctggcggggtgggggcagcgagccgaggttgcagtgagccgagatcacaccactttactccagcctgggcaaaagagtgaaactctgtctcaaaaaaaaaaaaaaggatgtggggggacgtgagggttgtggggtgactggcttgggcttgcacacgtaggcgtcgtttgttcaaaacctgaagtctttgttcaagacctgaaggaagtgagggaggagccatttggatgtctggggaaggggttccaggcagagagaacagcaagtagaaaggctgaggcaggaccatgcctggtgtgtttgtgaaacaaggaggaggcccatgtggctggagcagattgagtaaggggtaagtggaggcagatgagagaagggaggtgatggggcaaggccttgtgggaagcagtgagggctctgggttctgccctgaggaaggtgggagccatggagggttctgtgcagaggcgagacgtgaccttacttgggtgttcacagtgacctctggctgctctagggaacgagggagggaggccagggcaggggtgactgcacagatccagacaggtgatgatgggtggtggccatagaggcggtaaatggaagattctggtcctattccaggatgcattctgacaggcatggaagaaattctgattaaaaaaaccccagtgttttacagagaaacaaagcaccacaatcattgatcatttgcacagccattactagatctcccagcagaatcggtgccgtgagctgcagcacagataaaccaagctgtgaattatgagcgatcccggggactccaactattagcccacctttttctctcccactcaatcgagtctttttttttttaaggcttattggaatatgagcaaatgatataattgtacaaattatacagatgagcttgactcccccactaatctataaggaaaacaaaccattcataaacgccagctgaaactattacagtcagtcattcttcgagcctttgtacacccttcctaaatggggggaaccccctctttgtaagttgcacatcctcagccctggcagcggagcacagtaactcactttctccgccttccttgtactcaggtaggagctgggtggagctaacattcactgcaggtgtgcccaggattggccacagccaagagctttctctggtggtcatatcccaccctgcccttgcatggggccagcagaaaatacacccagcaatcctcagagatgacctacaggcattcgtgattaataccacccctcttgcctctccagtgggaaagaactcgaaggtgtatgttcatgaaatcttccagggcaacccattagatttacacctcagttgtccacagcagcaacctgctcattacttctcttttatttattcgtttattttattatttttcatttttgagacagactctcgctgtgtctcccaggctggagggcagtggtgcgatcttggctcactgcaacctccacctcctgggttcaagcgattttcatgcctcagcctcccgagtagctaggattacaatcacccacctccatgcctggctaatttttgtatttttagtagagatagggtttcactatgttggtcaggctggtctcgaactcctggcctcaagtgatccgtccaccttggcctcccgaagtgctgggattgcaggcgagagccattgcgcctggcacatttatttatttttttaagatggggtcttgctgtcgctcaggtctgggtcttgctgtcacccaccactggagtgcagtggtgcaatcctagcttactgcagcctcgaactcctgggtttaagccatcccctcccacatctgcctcctgagtagctgggcctacaggcaggtaccaacacacccagcttttttttttttttttttttccttttgtagagatagtcttgctttgctgcccaggctggtcttgaactcctgggctcaagcgatccacctgcctcggcctctcaaagtgctggtattacaggtgtgagccactgcgcctggcgtactcattaagtctcccggcacgggtttccttcacctcctctctcacttcactgctcccccactggttcttcctggggtatcttaggtggatacctgcacttaaatcctccctgaaagagcctgacctaagacaacaaggatggcccagtacaagaggaataccccaagaaagcctgcccctttggttctgggaggatccagaactactctcccacctcccttcttcttcttctcctctttttttttttttggagatggagtctcacttggtcacccaggctggtgtgcagtggtactatcagggcttttggcagcctcaacctcctgggcttaaatagtgattcctcccacttcagcctcccgagtagctgagactaaaggcctttagtctcaccatcgcacctactaatttttaaatttttttgtagagatgggagtcttgctatattgtccagtatggtctcaaactcctgggctcaagcgatcctcctgcctcagcctcccaaagcactgggattacaaggcatgagtcactgttacctctctgttttttcttttttttttttttttttttttttgagagggagtcttgctctgtcgcccaggctggagtgcaatggcgggatctcggctcactgcagcctctgcctcccaggttcaagcaattctcctgcctcagcctcccaagtagctgggattacaggcatgcaccaccacgcctggctaatttttgtatttttagtagagacagggtttcgccatgttggccaggctggtcttgaactcctgacctcaaatgatccacccgccttggcctcccaaaatgctgggattacaggcatgagccaccgtgcccggccctcccttcttgataaatctcattcttaaaaaaaaaaaaaaaaaacaaagaaaaacatcaaacaggagcccaagcatccctgcccctcctcccctggctctagtccccaagcaatttggatagaaacccccaaggaatatcttttgtgcagagacaaagccgccggttcaacgtaattaacatcttcctacattgcctagcgtgtccgttgaagcaaataagccattttctctcgacagaggaaatattgaattgtaaaagagaagcaagatttaagtggtgcagagagaaggcctccatggttttcctaaaataattgtctgcgttggacgcatctcaccggagtgttctctgcagcagtgtaattaaatgcctgggttttggctgccagatcgcagcaggcagaggtcctgagttttgcccattgggtttaagttcagatatgcagttaatgcatgtccctaggaaccgctggaatgttctggaatgtaccatgtgctagctctcccagactgggtctagcttggaaacaaagtcaagagttcttggcagtcagaagactagagaggaacagagagtgtcctactctaggggaaatgcttacaacagcaggtgcaagaacacaggcgttctccagcatagaagtctgtggtctagcagcctgtctcacctcggatgtggcagatgtactaaagaagccaacccacttttttttttttttttttttgagacagggtcttgctctgttgcctaggctggagtgcagtggcatgatctaggctcactgcagcctcaacttccctgactcaagcaatcctcccacctcagcctcccgagcagctgggactacaggcatgcaccatcacgactggctattttttttggtagagacggggatctcactacatttcctaggccgatcttgaactcctgggctaaagtgatccacccgccttggcctcccaaagtgctggaattataggcgtgagctatcacgacggccctgccaacccactctctctttgctgagctcttggttcagggtttaatattcctgctaatgggctttaagggagtgaagctatgcactcaagtatctgttcctcaaatgtcttttctggctgaaatcttacaaacacttttgctgaggctgccctaattaaacaccagcctctaaaacaggtccaggattaactgagtaggacacaggcagggaaagctgttcttgctgtcgggccagggatcatcatctcctactactccaccacctatatcttggttcaaaaacaattcctggtggccaggcatggtggctcacgcctgtaatcccagcactttgggaggtgaaggtgggcggatcacctgaggtcaggagttccagaccagtctggccaacatggtgaaaccccatctctactaaaaatacaaaaattagccagacgtggtggcaggcacctgtaagcccagctactcaggaggctgaggcagaagaattgcttgaacccaggaggcagaggttgcagtgagccgagatcgtgccattgcactccagcctgggcaatagagcgagaccccgtctcaaaaaaacaacaataacaacaacaaaaaaaaacaattcctggtgtttccctggggacggaggcattgctacagggtcctggggacaggagaagcattggctatcaggaagtagccaacaggaagagagcaagcgcctgcctcttaataaaatgaagctattattgtgtttgaggctggataatttaatcaggaagccaaggcaccttggggcttacatatttatttgtgccctgccttgttccagagaggactctaagtggtttacaaggatatgtaaaataccataagatagcgccaattaaatatgagagcggggattagatatttttggaggacagcctgccagtccacagccaagccattacagtttctgcaatttgcattttattcggccaatccaaagctaagaattcagcccatggaaactttgtggacagcatctgattgttgcaagggaggttcattaagcattgtttaaaattggacaattagaaattaatttgatcaaaagctattacacatgctagaaaaaaaattttttttttttggagacagggtcttgctctgccacccaggctggagtacagtggcatgatcatagctcactgcagccttgatgtccaaaggctcaagcgatcctcccacctctgtctcctgagtaggtgggactacaggtgtgagccactaaaccaggctaatttttttttttgagatggagtctccctctgttgcccaggctggagtgcaatggcgtgatcttggctcactgcaatctccacctcgagggttcaagtgattctcctgcctcagtctctggagtagctgggattacaggcacctgccattatgcccggctaatttttgtatttttgtagagacgaggtttcaccatgttggccaggctggtcttgaactcctgacctcaggtgatctgcccgccttaccctcccaaagtgttgggattacaggtgtgagccaccacgcctggcccaggctaatttttaaaaagattttttgtagaaacagggactagctatgttgcccagcctggtctcaaattcctgggctcaagcagttctcccacctcagcctcccaaagtattgggattacaggcgtgaggcactgtgtccagccaatttacaaatttaagatgcatctacagaatgagatactatgcagtcattaaaaattagagattaatggagattttaatcaccatctttaaatttatcttattttccaagttttctacaatgaacgtgtattgttcttataaagatttttagggccgggtgcagtggctcacgcttgtaatcccaacactttgggaagccaaggcaggagaatcacttgagcccaggagtttgagaccagcctgggcaacatagtaaaacctcatctctacaaaaaatttaaaaattagcatggtggcacatgcctgcagtgccagctactcaggaagctgaagtaggaggatcacttgagcccaggagttcatggctgcagtgagctatgaaggcgccactacactccagcctgcgtgacaaagtgagaccctatctcaaaagaaaaaaaaaagatttttaaaagtcccttaaatttttttttttttttttggcaagggagaaaaagaagaaaaacaaaagcagggacataaaacagagccagaaacgaggctaagaaaaactcatcccttaaaaacctgaacaatcagcatatggccgggccataagtttggctccaagctccttagcagccaactcagaaagggaaagctggtcatttatgcggttctcagtgtcctgaaacaaaagtacaccagatgctcaggagaaagctcaattatttttggcagggatttctcccacagtcctcccaaaaaggattccacgtgatgtcaccagcatctctccgggcaatatccttacgatagaagtgactagtttcctctagatgtttcttattcctcctgggatggtagagtagggccaactggtaagagcagggtcctggagtcaggctgcctgggtttaagttctggcttcaccattcgcttgctgtgtgacctcagcaagtggcttaacctctctgtgtctttcttagttttttcatttgtacaatggacatgatgactacctacttctctgggttgctaggaggatcaaatgagttcataatatatataagagcaattagaacagtcatcagcatgtagtaagagctacacaagtgtctgctaatactattatttttattttttaagagacagggtgtcactctatcgtccaggctggagtgcagtggcacaatcatggctcacttcagcctcgaactcctgacctcaagcgatcctctggccatcagcttcctgagcatctgggactacaggcatgtgccactatgcccagctaattttttattttttgtagagatgggagtcttgctataattgcccaagctgtgtttgaactcgtggcctcagacagttcctccagcctcagactcccaaaatgctgggattacaggcatgcaccactgcacctggttaattttttaaaatatttttgtagagacaggatcttactgtgctgcccagactgctcttgaactcctggcctcaagcaatcctccagcctcagcctcccaaagtgctaggattacaggcatgcaccactgcacctggttaattaaaaaaaaattttttttttgtagaggtggagtctcactatgttgcccaggctggtgcagcagcacgctcacggttcactgcagcctcggattcctggcctcaagggatcctcccatctcagcctcccaaagtactgggattactggcctgagtcatcacacgctgccctgctattattatcttcataacactcaaaaggccaatttggtaacttcctgaggtcaaacggtgtgagtcttgacacaataaaaaggatctggcaaagtctcatggagttggggttgaggctgtgggatcatgaggcaaagaaagtccaacgagggagagaggagagtgagggatgagaggggacacttgctccatcctagtccccacgcggcccagctggcttccttttccagaatatctccttgctataacctggcagcaggggagccaaggtccttctccatccttacaggcactgaaccaggatgtaggcgcacactgctgtgttctctctggcccatcctctctaattgtctttcccttcccaggtcacaggatgcttattctcatctccaggcctttgcacgggccgggcctgctgccaatccccgcactctccccttcttagggccaggctaactcttccccatccccggggctcaagcgttcaggtctcttccaaaagcagtcttggtggtccctgccacgcgttaccctcctctcaagtcacccgggaggtggaggttgctgtaagccaagatcgcagtgagctgagattgcaccattgcactccagcctgggcaacaagagcaaaactttgtctcaaaataaataaataaatagccgggtgtggtggtgcatgtctgtggtttacagtggctcgcatctgtaatcctggcactttgggaggccgaggtgagctcaagagtttaagaccagaccgggcccagtggcttatgcctgtaatcccagcactttgggaggtcatgtcaggcagatcactctaggtcaggagttcgagaccagcctggccaacatggtgaaaccccatctctactaaaaatacaaaaaattagctgggcatggtggcgagagcctgtaatccccactactcaggaggctgaggcaagagaatcacttgaacctaggaggcagaggttgcagtgagctgagatggtgccactgcactctagcctgggcaacaaagcgagatcctgtctaaaaaaaaaaattatataaaattccgggtgctgtggctcacacctgtaaccccagcacttcgggaggccaaggcaggcggatcacaaggtcaggagttcgaatccagcccgagcaacatggtgaaactccgtctctactaaaaatacaaaaaaattagccaggtgtgctggtgtgctactatgatcccagctactcaggaggctgaggcaggagactcgcttgaaccctggaggcgaaggttgcagtgagctgagatcccgccattgcactccagcctgggccacatagcatgactctgctctcaaaaaaaaaaaaaaaaaagctctttgccaaagcatcactgcctgtaagtgatgtagctggaattcgaacacaggccatctggttacacagtctacactggcttgcggcacctctcctgtcctcctccaagccctgatcacagtcgccattaggagggcctcacgggtgggaatgctggctccaggcctgcctctaccctgggaaaggaaaccacaggggagcggggagttttgtttgctgtgcaaacaattcatccgtgatcctcagaacctggcacaaggtatgtttgttgaatgaggatgctgatgaaccagtgggacagagagcaaacaccttcacaggtctaccgtgaatttctcctttctgccacggagcttgcttctgttgttcgtcctagggaaggatcacctgagattaggctgcagacaggtgcccagtaggctaggcagaggctgtggcttctctctgactgcgagaatggcaggagggccgtgatgaatgatggagaatgtgcctgtctgctatgtctgagccgtgacagggggccacgtccctttggaaagcttgagataatagcagcctgctcttgtcaaaccttgaggtattgggcaaatatcccctgagtgataagcttgacaggccttaaagaagatatcagccaggcgctgtggctcatgcttgcattcccagcacttcgggaggccaaggcaggcagatggcttgagcttaggagttcgggaccagcctgggcaatatggtaagaccctgtctctaccaaaaatacaaaataatttagccaggcatggtggcacgagcctgtggtcccagctactcagaaggctgaggtgggaggatcgcctgagcctgggaggcagaggttgcagtgagccgagatcacgccactgcactccaacctgggtgacagagcgagaccctgtctcaaaagaaaaaaaaaaaaatattagttcacccgcgccatgctggaagcctgggaaccgcctggggcctccctcagcctgagaactggggttttgcctggaagagccttgtgggtcggggaggggtcaggatagaaagtgattgtgaatccacatattcattcatccatccattcattcacctttccacccattcatccatctatccattcattcataaaaccaaccatctatccatctatccatccattcattcatctgctcatccatttatctgtttacccattcattcattcatccattcactcgtattcattcatccaaccatccatttatatacatccatccatctatccatccatccattcattcatctgtccatccatccctccccaagctctactcccattctgaatttcatattttacttaacacttgtagagctcgctcttcttagttgctttacaaatattaccaaaattcaatccttagagccccatctcatggtaggtactaacactagctccattctacagatgggaaaactgagatacagagaaaagtcaagttacccaaattcacagagctgggatttggatgccagcctatcagactctcagccactatgctgggaggacaagagtcacttccttcagggtctcactctgccgcgcaggctggagtgcagtggtgtaatcacggcgcgatcactgctcactgcaacctccacctcccaggctcaagccatcctctcatttcagctccctgagtagctgggactacaggtgcacaccaccacgccaggctaatttttgtattttttgtagagacggggtttcaccatgttgcccaggctggtcttgaactcctgggttgaagggatccacctgcctcagcctcccagagtattgtgtttacaggcgtgagccatcacacctggccaacatttttggttttttaagagacagggtctcaagcagttgtccaggctggagtgcaggggcatgatcatagctcactgcatcttcagcctcctaggctcaagcagttctcttgcttcagcctccggagtagctgagaccacaggtgtgtgccaccacaccctgatactttttttatttttatttttgttttgagatagggtcttgctctgtcccccaggccgtgtcccacattggtgtgatcatggctcactgcagcctcaacctcccagactcgagcaatcctcccaccttagcctcccaagtagctgggactaccgatgtacactatcatgcccagctaatttttttttttttttttttttttttttttttttttgtagagacaggatctcactatgtttcccaagctagtctcgaactcctgacctcaagcgatcttcccatcttggtctcccaaagcgctgaaattacaggtgtgggccaccatgcctacctaatcaacttttacttttggaattattttaggtttacagaaaagttacaacaataatacagagagctcctgtgtacctctcatcctgacttccctgttattacatcttacataaccatgatacacttgtcacaactaagaaatcaacatccgtgcatccattactattaactaaactctagactttattcaaattccccagttttcccacttgagtgctttttctgttccagaatctaatgcaggatcccacgttacactcagtggttatcacatgtctttagacttatctggtctatgacgtttctgtcttgttttttctgaccttgacagttttgaggattactggccagggagttttggagaatgccccactggcctttttttttttttttttaagagagatgggggtctcactatgttgcccaggctagactcaaactcctgaccttaagtgaccctcccacctaagcctcccaaagtggtggcattacagacataagccatcatgcccagccaccaccggcttttattttatttatttatttttgagatagagtctccctctgtcgcccaggctggggtgcagtggagccatctcggctcactgcaacctctacctcctgggttcaagcgattctcctgcctcagcctcccaagtagctgggactacaggtgtgcaccaccatgcctggctaacttttctatttttagtagagatggggtttcaccatgttggccaggctggtctcaaattgctgacctcaagtgatccacccaccctggcctcccaaagtgctgggattacaggcatgagccaccgcacccagtcttttattttattttttagagacaaggtcttgctgtgttgcccagactggtcttgaactcctgagctcaagtaatcctcctgcctcggcctcacaaagtgctgggattacaggcatgagacactgcacccgtcccctaatggcttttgagggcaggaactgtggcctcactttgctggacgtttccccagcctgtaacccaatgcagtagctgcttcagacgcttcctaaatgaacaaatattgaatggccatcactgagagctttatcttcctgtgctccctgttccgcaggcatccctgccagaggctagatctagaagagttcacggcgaaataaaagcttttctcctttcagaaagatttgtttttgatcctttctttgtagacatcaaggattcatttctttaatatttaagggcttttgtaccaaagagaagcagccgcatttgcatcagtctcattttttcaaggcaggcgagagagatctttctagcaagatggggtttcttccttcacggagctgtcacttgatttatctgcttctccttccccagccttcatgcctctggcagggggcagggaagagcgagggttctggaatgatccacagactctgatgtcctctctgccacagcccaaggaagcttaattagaacctcgccaatttgctgggactgaggtggccttaggagctggtgcaggggcctggccggggatgaagatgaattagcagcttttttttttttttgagacaggctggagtgcagtggcacgatcacgactcactgcagcttcgacttccctggctcaggtgatcctcccacctcagcctcccgggtagctgggaccacaggcacttaccagcacatctggttgtttgttgttgttgtttttcttttgttttttgtttgttttttctcacagagacagggtatcgccctgtctcaaactcctgagctcaagcaatcctcccacctcggcctccccaaggtgctgggattacaggtatgagccactgcacctggcctgaattagcagttttatttcctgtccctctgaatagctcaatagctaccacggggaccaaaagcctgccttgggtacacagagcatgtcccttttctaacattagctggtcagaagtgggaatccctttagccatgcaggcctgcaggtctcactgctttttatttctcagccccaggaggccaagctgaaggcagagaatctaaagaagctgtcttcagcgaggtcatctccccgccaccgaggtccctactgctgggagacactggccccaatttaatctcttgcctgaagtttttcagacgtaaaaatgagcctgggtgagcttttcagatagttccttcaacttacaggaattcaatttctggcctggatataaatttgcagccatcagcgcccgtggtaggggctggggctgggcgctttggccggggatggatttctgaaatcaatccgtccgcgtgtggaaaaggtcgccatgggggacatttaacttccatggctggctgaggcatttcacaccgatagccagggacacccctatacaaaatggaagtgtttgctgcgagtcccccaggcagcggctggagggaggcctcgaaggctggacagcacagccaggaggtgacattgatcaacctgccaataacagacagccaggtaccaggactcctgaaaacccacctccaagggctctttcctgctaggtccccatgcgcccctgcgggtggcaagtccactctgggtccaaaccctttatcccttggctacacctccaacacacattccagggtttcaaagaaatgagtctcaaatgcattcaattcccccagtggaggtgggaggacgtggtcattaagggtctcctaggttcgagcctcaggtctgccgtgtgaccttgggctactgacttaaccatcctgtgcctccgttcccccagttagagtatatagctaagaatagtactgatgtcatgaggtggttgttaatatatcagaatggcttaacgtaatgttatggtttgaatgtgtccccgcaaaattcatgtgttggaaacgtaatccattttatttatttatttatttaaagtgaaagcaagtttattagagaagtaaagaaacagaagaatagctacttcagaggctgggtgcggtggctcacacctgtaatcccaacactttgggaggtcaaggggggcagatcacttaaggccaggagttcgagaccagcctggccaacatggtgaaatcctgcctctagtaaaaatacaaaatttagctgggcatgatggcgggcgcctgtaatcccagctactcgggaggctgagggatgagaatcgcttgaaccaggtaggtgaaggttgcgatgagccgagatggtgccactgcactccagccttggcgacagagtgagactccatctcaaaaaaaaaaaaaaaaaaatatggccaggtgcggtggctcacacctgtaatcccagcactttgggaggctgaggcgggcagatcacctgaggtcaggagttcaagaccagcctgaccaacatggagaaaccccgtctctactaaaaatacaaaattagccaggcgtggtggcacatgcctgtaatcccagctactctgtaggccgaggcaggagaatggctggaactcgggaggcggaggttgcggtgagccaagattgtgccattgcactccagcctgggcaacaagagagaaactctgtctcaaaaataaataaataaataaataaataaataaataaataaatacaataaaataaaaataaaaaaagtaacagtgttgagaggtagcacctttaaagatgaggttaggtgaattaatgccattatcagggaagtgggttagttatcatggcagtgggctattgacaacaagaatgattttggtccaatttcctctctctgtgtcacttttgccttcagccctttggccatgggataacctttgccagaggctggtgctatgcccttggacttcccagtctccagaactggaaaaataaatttttttttttaagaaagattaattaattgattattttacagatgaggtctggttctgttgcccaggctggagtgcaatgatgcgatcctgactcatcacagtctcaacattccaggctcagtcgatccccctgccttagcctcctgagtagctgggactacacacgtgccaccacatctggctaatttaaaaaatctgtgtagtcatggggtctggccacattgcccaggtgggtcttgaactcctgggctcaagcaacccttccaccttggctgcctaggtgctcggattacaggcgtgagccaccacacccagccctttataaattacccaatctgtggtagtctgttatagtaacagcaaacaggccgggacacatacgcaacgtgatattcaagggagtgtgacagaattgcctatggaataaaaataagcaaatcggtgctgactgggaacacagaaaggtgggctggaccatctgagcttcaatcttggctctgtgttaccctggacaagtgactctctctgagcctcagtttcatttctctctttttttttttttttttttttttttgagatggagtttcactcttgtcacccgggctggagtgcaatggcacaatctcagctcactgcagcctccacatcccaggttcaagcagttctcctgtctcagcctccctagtagctgggattacagacatgagcacctggcatcagtttcatttctcaaacagggaaactggcagtaggtgatgagatgaccctgtcggcattttgaggctccagcgagctaatacaacggaagtgcttcaagccctggttcagagagagtgctcaggaaataccagtggctgttttccagataggacagcaccctccacagcttccccacattcacagataagcaaggaagaaagaaaaaggaagaggcaattataacagggtgtgataagtgccacgatgcagggaagcacagaacactggaagacctgggctctatctctgggctccagagcctgaattttttgtttgcttgtttgagactcggtagcccaggctggagcacagtggcgcagtcatggctcactgcagcctcaacctcctggactcaagcgatcctcccacctcggcctcctgagtggctgagtgatagggtctggatttgtgtcccgttcaaatctcatgtcaaattgtaatccccaatgctggaataggggcccagtgggaggtgactggatcatggggctaggtttccccttgctgttctcctgataaggagtgagttcttatgagatctcgctgtttgtttgtttatttattttgagacagtttcactcttgttacccaggtacaatggcgcaatctcagctcgttgcaacctccgcctcccgggttcaagcgattctcctgcctcagcctctcaagtagttgggattgcaggcatgcgccaccacgcctggctaattttgtatttttagtagagacggggtttctccatgttggtcagggtggtcaccaactcccaatctcaggtgatctgcccccctcggcctcccaaagtgctgggattacaggcgtgagccaccgtacccagccaagctctcgttgtttaaacgtgtgtagcacctcccccagtctctctcttgctcctgctctggccgtgtaaaacccgcctgcttccctttcaccccctgccatgaatgtcagtttcctgaggcctccccagctatggttcctgtacagcctgtggaactgtgagccaattaaacctcttttatttataaattacccagtgtcaggtatttctttatagcagtatgagaacgaactaatacactgggactccaggtgtgcgccaccacgcctggctaagttttttaatttttaaaaattatatttaaatttttaagagcctgggctatgttgcccaggctggtcttgaactcttttttgtcttttgaggtggagtctcactctgtcacccaggctagagtgcagaggcaagatctcggctcactgcaacctccgtctcctgggttcaagtgagtctcctggctcagcctcctgagtagctgggactacaggtgcacaccaccatgcctggctaatttttgtatttttagtagagacaaggtttcatcatgttggccaggctggtctcgaactcctgacctcaggtgatctgcccacctcagcctcctaaagtgctggggttacaggcataagccactgggcccggtctggtcttaaactgttgagctcaagtgatcctcccacctcggcctcccaaagtgccaggattacagatgcgagccactgtgcctggcccagagcctggttttgagggtgtagcaatggccttctggaagatgcaatagctaagtttacggatgtaggagcgagagtcagcatgggcaaaggcagggagggcagagcatccgttcatcccagaaatatttactgagcacccactatgtgccaggcactgttctaggtactggggtcactactgtccaggagacgcgcagacatccccaacctcataaagcttctgctctagtaggaagacgcatggcaaacagaggaacctgaaagttgtttaatgaggagttggggccaggtgtgatggggcacacctgtaatcccagcactttaggaggctaaggtgggaggatcacttgtgaccaggtgtttgaggttgcagtgagctgtgatcacaccactgcactccaacctgagcaagagagcgagaccccatctctaaaaataaataaataatacaaataaataaaagaggagatgaagacacacacataggaaaagaccacgtgaagatacagtaagaaggtggccacctgcaagccaatgagagaggcctcaaaagaaactaatgctttgatttcagacttcaagcctctaggattgtgagaaattaaatttctgttgtttaagccacccagcccaaagcacttcatgacagcagacctagtaaacaaacacacatttctgcagctttggcgctctctctgtggcctgggggtagcaatagctcctctcagctgcagacccaaggattttctgagacagagtcttgctctgtcacccaggctggagtgcagtgacgcaatgtaggctcactgcagcctctgcctcccaggttcaagcaattctcctgcctcagcctcccaagcagctgaatttacaggcacctactaccacacccggcaaatttttgtatttttagtagagacggggttttgccatgttggccagctggcctcaaactcctgacctcaagtgatctgcctgcctcggcctcccaaagtgctgggattacaggcatgagccactgtgcccggcaaccccagggattttcaacatccctttgctccttctattaaccttgcccacatctctgaaaacagtcatttcattccagagaattgtcctctggaatcccttttgaaggaactatgctttttcctgggaccctgccctatacagtgatgccctatacagtagcctgaccgggcagggctactgagagatggactctaagatggactcaagggtaggaaacttccaagggcgtgcatgtgagtttgctcaggctgccttgactgagtatcccaggctgggcagcataagcaacaaaaatgcattgtctcacagttctggaggccggaagtcagaagtcgaggtgtcagcagggttggttccttcaagcctcactacagcctcaacctcttggactcaagggatcctctcagctcagcctcccgagtagctgggactacatgtgcatgccaccatgtcccactaatttttaatttttttttttttacagttggggggtcttgctgtgtggcctaggctggtcttgaactcctgctgtcaagtgatcctcccacctcagcctcccaaagtgctgggacgacaggtgtgagctactgcacccggacctaatctccttttcttatacagacatgagtcatgttggattagggcccattccaaaggcctcattttaatttaatcacctcttaaaaaaaccccacctccaaatacagtcacattcattgtgaggtactgggtgttaagaattaaacatatgggctgggcgtggtggctcacgcctataatcccaacaccgtgggaggaggccgaggcgggtggatggcttgagcccaggcaattacttgagactagcctgggcaacacggcaaaacctcatctctacaaaaaatacaaaaattagccaggtgtggtggctcgcaccactaatctcagctactcgggaggctgaggagggaggatcacctcagcccagggaggtcaaggctgcagtgagctgtgataacgccactgcactccagcctgggcaacagagtgagaccctgtctcaaaaaagaaaaaaaaaaggccaggcgcggtggctcatgcctgtaatcccagctcttagggaggccgaggtgggtggatcgtgaggtcaggagatcgagaccatcctggctaacacagtgaaaccccgtctctactaaaaatacaaaaaattagccaggcaaggtggcgggcgcctgtagtcccagctactcgggaggctgaggcaggagaatggcgtgaacccgggagctgcagcttgcagtgagccaagaccgcaccactgcactccagcctgggcgacagagtgagactccgtctcaaaaaaaagaattaaatacatgaatttttggggggtggaaacacacaattcagcccatagctgtgtgtgagtggggtaggaatgtggtcaggggctgggcggtggctcacactcgtaatcccagcactttgggaggccgaggtgggtggatcacttggcctcaggagtttgagaccagcctgggcaacgtagtgagacgctgtgtctacaaaaaattaaaaaataagctgggcatggtggtgcatgcctatagcctcagcacctcaggaggctgaggtgggaggattgtttgagctcaggagtgagctatgattgtgccactgcattccagcctggggaacagagcaagaccctatctattaaaaaaaataaaaaaaaaagccaggcgcagtggctcacacctgtaatccccccactttgggaggccaaggtgggtggattacatgaggttaggaggtcgagaccagcctggccagcatggtgaaaccccatctctactaaaaaaaaaaaaatacaaaaaaaattagccaggagtggtgacaagtgcctgtagtcccagctacttgggaggctgaggcaggagaatcacttgaatccgggggtggaggttacagtgagccgagatcgcaccactgaactccagcctgggtgacaagagcgagactccatctcaaaaaaaaaaaaaggatgtggccaaggagatcatgaaaggtgaactggccagggcaaaacacaggcaaaaatccaacaaattccaggtaagcatatccaggctgactcagcccatccctctgggtaagcccaagactttcagatgaatcaatctcagaggcagaaaacagctccagcctagaggcaggcacgtcctctgcttggaggggagggggtagtggcggccacctgggtcaccggagacctttgttagcgagaatgggctgcttaaagggaaatcaatcctggctaagcactgagcagctgctcccagtcaaagctgccggagagaggcccgtggccccccagcttctccagggctgggagtggagccagaggaggctgaagactgctctgccaggtggcaggactcagagggccttcaatcagcctgcattgtacccgccagcgcctgtatccatccccggctgagcacgcacttcagtatcacctctagccatggcatgcaccaaagagcagcatccagcaagtgataacatcttcaccagtttagtcaagcattgcccgtgtgccaggcattttgcatgcacgatgtgtgcacgggggacctcatcgcaccacctcctagccatgacctcagacaagtgacttaagcctcatggtgcgccagtttccccatctgtaaaacgaggtgaacagcagcatccccctcttagggcagtcacggaggttgaacgaatgcctgcgcacacagagcttaaaatcacagtagtcttagctgggcatggtgactcacacctataatcccagcactttgggaggccggggtgaaaggatggcttgagcccaggagttcaagaccagcctgggtaacatagtgagacctccgtctctaacaaaaatacatagattagccaggcatggtggtgcgcacctgtagtcccagctacttgggaggctgaaagaggaggatcacctgagcccagggaggttgaggctgcaatgagctgtgatcatgccactgcactccagcctgggtgacagagtgagaccctgtctcaaaaattaaaaaaaaaaaaaaaaaaagcccaggcacagtggctcaggactgtaatcccagcactttgggaggctgaggcaggcggatcacaaggtcaggagttcgaaaccagcctggccaacatggtgaaatcccatctctaccaaaaatatataaaattagccgggtgtggtggcaggtgcctgtagtcccagctactcgggaggctgatgcaggagaatcgcttgaacctgggaggtggaggttgcactgagccgagattgtgccagtgcactccagccccaggtctatgggactgtagagatgctggtgtttctacagctaggactcgccagttctaggcattcttcagagctcacagcaaacaccaccacctccaggaagccttctccatcatctaagataggtctgtgttccttcctgtgcacatctccacagctccctgccccttccctccacaaagttcttatattttattcttttccttgcatggtgggtgtctgcatgccccattaggatgtgagctccaaaagggcagggctgagtctgtcttcttccatgctatggtcccaacaccagcagatgctggagacaatggacaggcatcaagatatgaatgaatgaatgaatgcttcctgtacactccaagttttccatgtgaccccttcctccccgactccccaacaccctctgtctgctctcttcctccttcctctcccatcacagggtggatacaggggctctgggttttgaagcggtcatggagtcaaaggtagttgagtgtagctgtgaagcacatggaccctggaggccgacaacttgaacttcaaaacccggcttctctttctagctgtgtgaccatgggaaagtgacttaacctctctgtgcctcactttccccacctgcaaaatgggagtgatagtagtgccttactgttgagtgagtgattctgacccattcccagactgcaattcccagactgggaggcagagggctgagtctccggcagttaatgaatccggaaaaaatctcagctgtgtcagaggagccccagtgccaagttggcctggttttcatcccaagagagctgagaacatggtctggtgtcagacatccacgctgtgattggcacaaatgcctggtgctcctatgacccccctcgttagggctgggggagtgtgggagatgctcctggggctctgcccagagctgctgactgcctagatgtacccaccctgcagctgctgagcacggcggctcattgctagcagctgtgatcttctctggacctgcccatggcttttgggagccaccacaccttggagatgcttgggaggtgtcacctactcccaggggcagctaatgactgatgcaggggtaaaaagcccactcctcttctcatggtgagataactccacagtgtccccccacccttgtggagcaagccaaaccgggactttacctaggatctcatctttgctcaatctattctcttccaggtcctgctcccctcacccctgccctgactttcaattatgtgctccacagtcaggcacggtggctcatgcctgtaatcccagtactttgggaggccgaggcaggaggatcattgagcccaggagtttaagaccaggctaggcaacacagcaagaccctgtctctacaaaagattaaaaaattaaccaggtgtggtggcgcacacctgtagtcccagctacatgggaggctgaggtgggaggattgctagagcccagaaggttgaggctgcagtgagccatgattgcacccctgcactccagcctgggcaacggagcaagaccctgtctcaaaaaagaaaaaaaaaaagtgctggaaacttacgtctctagttctgcttctcaggaacccaacctaagatgggggaaatgatgaacattcaacctaagagggtttttgtttttgtttttgttttttgagacagagtttcgctcttgttgcccaggctggagtacaatggagtgatcttggctcactgcaacctctgccttccaggttcaagtgattctcctgccccatcctcccgagtagctgggattacaggcacacaccaccatgcccagctaattttttgtatttttagtagaaatggggtttcaccatgttggccaggctggtctcgaactcctgacctcaggtgatctgcccaccttggcctcccaacatgttggtattaccgcactgggccctaagagggtatttatgtcagtgtcccttcaggttcacattcacaccctggcaccgagttctgtcatttccacctaaataggcaatccatcctgcacaaccccgaaagcagccctcacttcgaaatgcatcctcgattctgcccagtctgcctcgtccacatgtgcagcccctgtcatgctccaggaccatccctgatgcatttttccgcaccttacattcatctcgtttctttttctttctttcttttttttaaatctcagctcactgcaacctctgcctcctgggtccaagcgactctcctgcctcagcctcccaagtagctgggattacaggcatgtgccaccacgcctggctaattttgtatttttagtggagacaaggtttcaccatgttggccaggctggtctcaaactcctgacctcaggtgatctgcctgcctcggcctcccagtgttgggattacaggtgtgagccaccgtgcctggcctcatattatttcttgtctgtcgctctcatatgtacactccccaaagggcaggaatttttatcactttgttcattgctgtgtcctcaaaacagaacagtgcctggcacgcagcaggtgttcaataaacatctctggcattcaagaataaatcgtttaagtacattcacttgcaaacagaatccacccaatttttctttttctttcattttttttttagatggagtctcgctcttgttgcccaggctggagtgcagtggtgtgatcttggcttacagcaacctccacctcccgggttaaagcgattctcctgcctcagcctcccgagtagctgggattacaggcacacaccaccacccccagctaatttttgtatttttagtagagatgaggtttctccatgttggccaggctggtctcaaactcctaacctcaagtgatccacttgcctcggcctcccaaagtgttgggattacaggcatgaaccaccgcaccgcccaccctctctttctcttataccaatgcatcagccttacctttagaatctacccattgctctaccctcttgatggccatctccatggtcaagcccctggcattgctcacctgaaccagcagagttcatcccttccatggtctcccagttccccctacttgcccccacagtctgcttcccccacagcagccagagagcacctgtgaacacatgaatcacactgagtctctcccgtgctgagaaccctccatggctcccatctcccctgagttaaaagcccaaatcctcagccaagcgtgattacacctgtaatcccagtattttgaggccagaggatcacttgagcccaggagtttgagaccagcctaggcaacatagtgagaccccatctctacaaaaaattaaaaaataagccggaagtggtggcatgtgtctgtagtcccttctacacaggaggctgaagtgggaggatcgcttgagcctgggaggtcgaggctgtggtgagccatgatctctccttgtctcaaagtagagttctccccaaggcacgtaactccttcacaatctgtcccatcacctccctgccctcacttccttccactctccctctcactcactctgttccagccacactgttcctgcaaaaccccaaacatatttcttctatatcacctctttgcactggctatcccctctgcctgaaatgtccttccacctccttcagacccttactgaaatgtcattgtctcaaaagaccctccctgctggcctggcgcagtggctcatgtctgtaatcccagcactttgggaggctgaggtgggtggatcatttgaggtcgggagttcgagaccagcctggctaacatggtgaaacccccgtctctactaaaaatacaaaaattagccgggtgtggtggtgcgtgcctgtaatcccagctactcgggaggctgaggcaggagaatcgcttgagcctggggggcggaggttgcggtgagctgagatcatgcgactacactccagtctgggcgacagtgagaccttacctcaaaaaaaaaaaacaaaaaacaaaccttccctgatctcccctggccagaactacaagtgccccagcaccccccatccacttccctactccatctgcttccgccacatcatttatgcattaattttgcaaattatctttcttcccctccagaacgtcaggcaggagtttttacctgtttttgttcactgctgtgttgccagcacttaaaatagatcatcttgcacacaacaggcacctggtatccatttgttatttttaaaattctgccgggcacggtggctcacgcctgtaatcccagcactttgggaggccgaggcgggcggatcacaaggtcaggagatcgagaccatcctggctaacacggtgaaaccccgtctctactaaaaatgtaaaaaattagccgggcatggtggcgggtgcctgtagtcccagctacttgggaggctgaggcaggagaatggcttgaagccgggaggcagaggttgcagtgagccaagattgcgccactgcactctagcctgggtgacagagcgagactccgtctcaaaaaaaaaaaaacaattctgcacaacaaccatatgaggtaggaactctcggtgtgccccttatgtgggtgaggaaactgaggcctggagaggggagggggtgtgcttgggtcatgggttagggagtgagctgtggccatgtgtctctccatggtgtgtatgtgtgcaactgtgtgttttttgtattttgttttttgtttttgagataggctcttgctctgttgcccaggctggagtgcagtggcgcgatcacagcacacacagtgtcaatctcccaggctcaagcaatcctcccacctcagcctcccaagtagctgggactacaggtgcatgccaccatgcctagtaaatgtttgtcttcttttgtagagatagggtctcactatgttgcccaggctggtctcaaactcctgggctcaagcaatcctcctgcctcagcctctcaaagtattgggattacagacataagccaccacacccagcccaactgtgtgttttgtgcagatgcagtgtgagtggctgcatcagcccgaatgtggacagaggaggatgcattcaggctcactttgcatcggggtgtctgtgagtggaagggaggcagtgggccagacccaggcaggtgtgaacacgtgtctgtgtgttcggctgggtatgaatgcgtgtgtgtgcgccaatgcactggcggatgggaaattgtgcatccacagtgaagctgtgtgtatgtgtgtgaaggggaggctctgtgagctttggatggggctggagctgcagttgaagcaatgttgtgggtgagggaagaaccccaccagccacaggcctgttatttatagacgaatcctggttcataaattccaatttttttttttttatatctgcctcactgccaggcccctataaatattcatgagtttcctgccttggaatatttgagtagtcagaaggaggagccgggaggagaggggacaacgaagggtccccagtggcgctgggagctcacacgggtcgggaggacaggggtctctctggttttgccttctcttccctctgggctcccctcttccaagctgcagctggcaagacggggaaggcgctgggctggtggagacatctaccagcacctattattcttcttccccagtgtctgtggaaaaataccacccactccgggggcagagaaggtgtctgcactgttttctcagctccagctctagctgcagctcagaaactcattacccctgggacccccagctcaacagagacagggagatccccctgatgtatctgaagctaagggaagactctggggggagggggcgggcactgtggcctcctgccctgcctcaaggaaggaaacaggtcatgagaatgggtgcccgtgagaaggaataaagtgcgtgcatgtggacgtgtctacaggagtgagtaactgttggaacatgtaagagactgcagtagtcaacagaactgttgacacattttctagttcttttctcttaggcacatgatggggctgtaggacttccccagtgtggccacgtgacttcctttagccaatgccttttaaacggcagtgacttccaggtgaatactttaagagccggtgtggaccaggtgtggtggctcacacctgtaatcccagcactttgggaggccaaggcaggagaactgcttgaggccaggagtttgagaacagcctgggcaacatagcaagacccctattctacaaaatattttaaaaatttatcgggcatggaggtgcacacttatattcccagctactcaggaggctgaggcaggaggattgtttaagcccaggagttggaggctgcagtgagctgtgatcacaccactgcactccagcctgggcacagagcaaaaccctgtctctgaaacaacgaagaaaaaaagaggcaagccagtgtgcagtgccacagtcttccctcagcaaccgcagaagggcatgttgggctgggtgcagtggctcacacttgtaatcccagcactttggtaggctgaggcacgcagatcacctgaggtcaggagttcaagaccagcctggtcaacatggtgaaacccagtctctactaaaaatacaaaaattagccaggcctggtggtgggtgcctgtaatcccagctacttaggaggctgaggcaggagaatcacttgaacctggaggcagaggttgcagtgagccgagatcgtgccactgcactacagcctgggcaacagagcgagactccatctcggaaaaaaaaaaaaaaaaagtgcatgctggggccaggcacagtggctcacatctgtaatcccagcactttgggaggccgaggtaggtgaatcacttgaggtcaggagttcgagaccagcctggccaacatggtgaaatcctgtctctactaaaaatataaaaattagccaggtgtgctggcacgtgcctgtagtcccagctacttgggaggctgaggcaggagaattgcttgaaccgggaggcagaggtgagctgagatggcaccactgcactccagcctggcaacagagcaagactccatctcaaaaaaaaaaaaaaaagtgcatgttggtatgaagcctccatcactggggtccctgagtggccagactaggcagagaccctgccaaccctcatgtatcatgagcaaaagctcatttggttgtactaaccctctgagacttgggggctgttttgttatacagcaaaacctagcctatgctgactggcacagagccagtgagtgtgtgagactgaggtgtggcacgtctgtgtctacatgatcaagaacacacatgagcaggtagctatatataggtttatgtgtgtgagcatcagcaagtgtataaaactatgcatatgaatgtataaaacaggatggtgtcagatgatagataagtgagaaaactccagggacactgttctccgagaacaccatgaccctggagtcgggcactattgcagatgtgaaactggcatagtgaggagggctatgtctgagtgtgccagttggctgtgtttgtaagactgtgatgtggtctgtacgtgtgtgtgccagggtttggggtgtcaatgtgcatgtctgtgccacgtgttgctgtgtatctgaggcacgtgcatgggttggtgtgactgtgtgtgtgcatgtgtgtatctgctgctgtgtggatatgtgataccctgggtgtgacagcctatatggagtgggggcatcactcaagtctgtatcagagtacatacagccaacaccacagggagggacagccaccctgggcatccctagtgctgttggctcatgggcctgacctggctcaaccttggatcctaggatgacctggcattgggaaataaaattctggctgtgtgcggtgcctcacgcctgtaatcccagcactttgggaggccaaggtgggtggatcacttgaggccaggagttcgagaccagcctggccaacatggcaaaaccctgtctctactaaaaatacgaaaattagctaggcttggtggcgggtgcctgtagttccagctactcaggaggctgaggtgggagaatcacttgagcccaggaggcagatgacgccactgcactccagcctgggtgacagagcaagactctgtgtcaaatcaaatcaaataaaaataaaattctcatcccctcatgagtcctgggacattccaagtcatctgcaatggccattcatcccagaggcactcgacagtttgggtgacgcggctcaacaagtagggagagcaaacctgttctcccacaacttctctaagataagcccattttctggttctctcctcacaaggttctggtctgatctgtctcaggatgtgggttcagccctggtccatctcaggattcaagttaaactctggtctatctcagtacttgggtttggccttgtctatctcaagtccacagcgtagccctgatctacccaggactcggatttggtcctggccctcttcatctcttagaaccaggtttctctttggtctctcccagttaagcctttgtctgtccaaggcttgggcttgactctagtctgtcatagagtcaaaccacaaggcatcttttattttttttctttttctttttttttttgagacagagtctcgctctgttgcccaggctggagtgcaatggcacaatttcagctcactgcagcctccacctcccaggttcaagtgattctcccgcctcagcctcccaagtagctgggattacaggcgcctaccaccatgcccagctaatttttgtatttttagtagagactgggtttcaccatgttagccagggtggtctcgaactcccaacctcaggtgatccacccgcctccacctcccaaagtgctgggattacaggcgtgagccaccgcacccggccaatcatggagcatcttaacaccttggggatgtatctgtgttctgttccaggacttgagtgaaccccccgtcttggaacctgagctgagcctggtctatctcagtacctgggtacaccctgccctagtagaacgttcacaatcaggtgaggatttcatggcagaaatttccccttcctgggcaccttctcacgtgtggagcacttctcttaaagtgtttggggcctcttgggtgaacgtctactgcaaatgattgctgtgtctcaggattaatgagggtaaggggatttcatttctccaacgccatcatgtaaaattcattaaagcagagttcgcaggtctatttcaaggattattaccagggtttcttgatgagctattacacacagcataaatcttcaagaggtttcaagacgttacaagaaccatcctgagtctcacctcatagatactagagttgaacatccctctatctgagctctccccagcctcagacaccaaacctcaggtcaggagttcaggagagagcattcaagagggttttcttggtcgggcatggtggctcactcctgtaatcccagcaactttgggaggccaaggcggatggatcacttgaggccaggagttcgagaccagcctggccaacatggtgaaaccccatatctactaaaaatacaaaaattagccggccgtggtggcgcacgcctgtaatcccagctactcaggaggctgaggcaggagaaccacttgaacccgggaaggggaggttgcagtgagcagagatcatggtaacatgtgctaaacaggaagggtcaaaacctgctgtcacctgagcccaggtaagtcacggctgcagtgaaaccgggatggtgtcactgcactccagcctgggcaacagagtgagactctctctcaataataataataataataataataataataataataaataaataaaataaagccaggtgcagtggctcacgcctgtaatcccagcactttgggaggctgaggcgggcagatcacctgaagtcaggagttcgagaccaccctgaccaacacggagaaaccccgtctctactaaaaatacaaaattagccaggtgtggtggtgcctgcttgtaatcccagctactcgggaggctgagccacgagaatggcttgaacccaggaggcagaggttgcagtgagccgagattgcaccattgcactccagcctgggcaacaagagcaaaactccgtctcaaaagaataaaaaattaaaaaaatacataaataaaataacttcccactcctcggttgagaaccacagctctagacttagccttgcattttctctttatctttctctaaggagtctgacccttaccaaagcgtccatcaacacctgcctgtatatatgtcctcagagctccaatgcatatattcatcatctgactccttgaccgctccccctgccccagatatctctaaggcatctcaagcccaacatgctcaaactgaagtgcacagccttccctccctaacctagttcttatccaacattccttatgtcaccatctccatcctccccacccccgggccagtgggtcagacacccgggcattatcctcaccctcattttactccctcaccaaatcctactgatgttaactcctagatagctttagaattcatgcatcattcttcatctctatcaccatgcaatggtccaagccactttcacaattcagcaagtctaggctgtgtgcagtggcttatgcctgttatcccagcactttgggaggccgaggtgggaggactgcttgatcctaggagtttgagaccagcctgggcaacatactaggaccctaactgtaccaaaaaaaaaatttttttttaattagcggggtgtggtggcacacgcctgtagtcccagctactcgggaagctgaggtgggggatcacttgagcctgagaagtcaaggcttcagtgagccgtgatcacaccactacactccagcctgggtgacagagtgagaccctgtctcaaataaataaataaataaataaatgtaaaatatgacaaaacatttaaataaaaataaagtctattcggtctacctcaatctaccttttttcttgctagtaactctacacatgggagcttctgggaaactttatttatttttattatttatttatatttttagaccgagtctcgctctgtcgtccaggctggagtgcagtggtgccatctcagctcactgcaacctccacctccagggttcaagtgattctcctgccccagcctactgagtagctgggattacaggcccacgccaccacacctggctaatttttgtatttttagtagagacagggtttcaccatgttggccaggctggtctcaaactcctgacctcaagtgattcacccgccttggcctctgaaagctgggaaactttacaacgcacgtgtgatcatattatcctcccggccaaaaccatattggtggattccttttattcttaggatagagataaaactccttaatgtcgccacaagagcctgtggctctgcactttacttacttctctgctttcatctggtctcctcgttcccaggccttctttactttattttaatttttttttttttttttttttttgagacggagtcttgctctgttgcccaggctggatggagtgcagtggcgcgatcttggctcactgcaagctccgcgtcccgggttcatgccattctcctgcctcagcctcccgagtagctgggactacaggcgcccgccaccacgcccgactaatttttgtatttttagtagagacagggtttcactgtgttagccaggatggtctcaatctcctcaccttgtgatccgcccgcctcagcctcccaaagtgctgggattacaggcgtgagccacagcgcccagcctattttaattttttttagagacagagtcttgctctgttacccaggctggagtgcagtggcacaagtgtagcttactgcagcctggaactcctggctcaagccatcctcccaccccggcctccgaaagtgctgggattataggtgtgagccaccacctcacctggccttgcaaggccttctttagtccatcatattttccatccttcctcttaccccagggcctttgcataagcaattccctctgcgcagagcatcctttcctctctgcatcagatctcagctcttgcttcctctgacttccaaattacatcaaatctccttattagaagctactagagcaccaagaatctttccctcaaagctgttaatcacagctgccaattatatttatttgcaactacataatcatcacctacctccctgttttgcagaaagcgccacacatccatgtctgtttggttgaatataatttctcccttaaaagcatataagaagtcctcaaaaacacttgttgagggtgcagtggctcacacctataatcctagcagtttgaaaggctgagacgggtggatcgcttgagcccaggagttcaagaccagcccgggcaacatagcgagaccctgtctctacaaaaaattagaggatgtgggccagatgtggtggctcacacctgtaatcccagcactttgggaggccaaggtgggcagatcacctgaggtcaggagttcaagaccagcctggccaaaatggtgaaaccccatctctactaaaaatacaaaaattaggcaggcatggtggtgcatgcctgtaatcccagctacttgggaggctgaggcaggagaatcacttgaacccagaggtggaggttgcagtgagccaagatcccaccactacactctagcctgggcaacagagtgagacttcgtctcaaaaaaaaaaaaaaaaaaaaattagaaggcatggtggtgtgagcctgtagtcccagctactcaggaggctgaggtgggaggattgcctgagcctagggaggttgaggctgccgtgagctgggatcgcgccactgcactccagcctggacgacagaatgagactctgtctcaaaaataaaataaaataaaaacaaaatacttgttgaataaataaatacacgaatggataaatggctccgctgttttcaggatctagtctgagtgacttggcctggcatttgaggctctccatgacctcaggggctgagctccctcccggtctcagtaaaggtcagagcaaaaacccaagggcatgagatgccaggtggggaataataattcagcagaagcaagaagtcagaagcacagtgaccaagacaattcaggctcctccacagagtcacaaaaatcttgggggacacactggctttcttcccatggagcatggaagggggttcggatcattgttacttcctggctattaacatgcagagtgacctgtctgatgtctgttctgccttgattctccttgtcttttattttatttttacttttagacagggtctcgctctgtcacccaggctggagcacagtggcgtgatcatagctcactgcaacctcgacctcctgggctcaagcaatcctcccacacctcagccttccaagtagctgggactatagatgcatgctactgtgcccagctaatttttttttttttttttgagacagacacgggatttcaccatgttggtcagggtggtctcgaactcctgacctcaggtgatacacccacctcggcctcccaaagtgctgggattacaggcatgagccatagcgcctggccccagctaatttttttaaaaaaattttttgtgctgggagtgttggctcatgcctgtaatctcagtactttgggaggccaaggcaggcagatcacctgaggtcaggagttcgagaccagcctggccaacatgatgaaacctcttctctactaaaaatgcaaatattagctgggtgtggtggcgggcgcctgtaatcccagctacttaggaggctgaggcaggagaattgcttgaacccgggaggtggaggttgcagtgaacagagattgtgccattgcactccagcctgagcaacaatgagactccgtctcaaaaaaaaaaaaaatttttttgtgtgtggagactgggtcttgctatgttgcccagggtggtctcaaattcctgggctcatgcgatcctcctgcctcaacctcccaaagttctggaattacaggcatgagccactgtgcttggccccctccttatctttaagaaattctccctgggccttataagtctctccagccaccacgccatttctgtgttcctctcttcccccaattcatcacatctgatccatcagcaagtgctgacggctctgcttctgagatgtaccagtctgcccactgctcaccattccagctaccactgttctggttcagataacaccgggcttgctcggtccttctgattctactctcacttccgggaatccattacccaacccagcagctagagagatctttaaataatgtgaatcagatcaagtccctccaccccacggcaaatcgtccagcagcttctcactgcgtttggaataaaagccaacaactttgggaggccgaggtaggtggatcacttgaggtcaggagttcgagaccagcccagccaacatggcaaaaccccatctctactaaaaatacaaaaattagacaggcgtggtggcagccacctgtaatcccagctacttgggaggctgaggcaggagaatcacttgaacccgggaggtggaggctgcagcgagccaagtttgcaccactgcactccagcctgggcaacagaatgagattccatctcaattaaaaaaaaaaaaagaataaaagccaacagttcactgtggccagaagcctcgaatgcagtgttccctgccaacctctacaactccattctctctccctctccagccttctctttccagagtgcactatgcttgtttcaacctcagggcctctgcacatgcagctccctctctcatgatgcccgtctccctggctccttctcaatcagctccccaaagagcttaccccagtgacccaacataatggggctcacccactcatactctctcccatctacttgttttgttcttctcttttcttttttgagacagagtcttgctctgtcacccagactggagtacagtggtgtaaccatggctcactgcagcctcgacctctgggccccagtgatcctcccatttcagcctcccaagtagctgggactacaggtgcacgccaccatgcctggccaatttctgtatttttttttagagatagggtttcactatgttgcccagtctggtcttgaactcctgggaccaagcaatcctcccacctcagcctcccaaagtgctgggattacatatatatgtgagccaccacacccgccccacccccgccggatactgtttagccctctgtactgcgcttatggccagatgataatttcttgtttatttgtttgttattgatctcctcccaccacaatgtcagttccacaagagcaagtgccttgtctcacgtgtccccctggcacatagtaggtgcataataaatatctgttgaccgaattgacaaatgagcgaatcatggctttctaggtccctggagccccagctattgggttttgtgagatcccctgcattccttacataaagctcctacttccctgggccggttaggaggctttcaattccaaacagactctctgactcccacccaccccatggccaacaggaggcaaatgaaaatgaagagaggtgtcagggaagagctaactgccgagagaggaaacctgggaaggggaggagagggatgacttgaaaagatggaccttctccagctggagcagggaaggagagaaactgacggagctgcatcagtggatgatggaggcacaccacggtggacacaagcacacgcaggaggtgtgagaaaaggctggaaaatgagacagaaaagggccgggatctctctgcaccacactggtggagaatattcatgatagtaatcatgattcgactcaataaaaaccacggtctctaccacgcactgcacccttccttgtgccgggcacctttctttgcattgccccccatacttagctctgatgggggaaaggtgtgaaacgtgatgggggtggggagagaaatcccagctaaaaaaggctggtgaagcgcttcgggtggctgaggcaggagggtcgcttgaacctaggagtttgagacccgctcggacaacattgtaaaaccctgtctctacaaaaaaattaaagattagctgagcatggtgatgcatgcctgtagtcccaactactcagcaggctgagttgggaggatgacttgagcccaggaggttgaggctgcagtgagctatgattgcagcactgcactccagcctgagtgacagagcaagaccttgtttcaagagaggagaggggagggaaggggagggaaagggaaagggaaggggagggaaggggaaggaaggaaggaaggaaggaaggaaggaaggaaggaaggaagggagggaggggggagggagggaaggaggaagggagggaaggaagcggggagggagggaagggagggagggagggaagggagggaaagaaagagagtgaggaaggaaggaaggaaaaaggaaggaaggaaagaaagaaaaaggaaggaaagaaagaaggaaagaaaaagaaagaaaggaaggaaggaaaagaaagaaggaaagaaggaaagaggacggaaagaaagaaaggagaaaaaaaaaaaaggaaggaaagaagaaagaaagggagggagggagggaaggaaggaagctggatacagtggcctgtgcctgtaattccaactacttgggaggctgaggaattagacttgcttgagcctggaaggcagaggttgcagtgagctgagatcgcgtcactgcactccagcctgggcgacagagtgagactctgtctcaaaaacaaacaaacaaacaaacaaacaaacaaaaaacataatgaaagaaaggttggtgtggtgagcagggctgtgctcagggctctgtattcctggctcactatccaggatggccgagaactcagacacccacctgactctgaacttccctctgtactcctttgaaaagagcctgagggcacttttgaggccacctttgttggctttgagatctcgctttgccaggagttcagagaatttctggagatttggttatttgtgttccaaaagagcagcatgtaggcattggagtgcacagggattctgcaaccagatgtggacgcctgtgttgtttatccacaggcacctgtgaattcccacgtttagggcacatgtggagtatctggacatgcctgtaactagctatgcacatatgtgcacatcagtggaaatccagggaaacgccattgtgcattagaggatatgtatgtctgtgtgctgttgccaatggcaataaacattccttttgttcacacatgttcacaaacattctatttccatagattctgtgtacaattcgtgagcccacaagtcaacctgcgtaatcactttatatactgactatatatatatatatatttcgagatggagtctcgctttgtcacccaggctggagtgcagtggcgtgatctcggctcactgcaagctctgcctcctaggttcactccactctcctgcctcagcctcccgagtagctgggactacaggcacccgccaccaagcctggctaattttttgtatttttagtagaggcggggtttcaccgtgttaaccaggagggtctcgatctcctgacctcgtgattcgcccacctcagcctcccaaaatgctgggattacaggcgtgagccactgcgcccagccgactctatattgatattgaggacactggatatatctgtgtttacttgccttcatcttttttttttttttttttgagatggagtctcactcagtcgcccaggctggagtgcaatggcgtgatctcggctcactgcaacctctgccttctgggttcaagcgattctcctgcctcagcttcccgagtagctaggattacaggaacccaccactgtgcctggctaatttttatattttgtatttagtagagatgggttttcaccatgttggccaggctggtcttgaactccactcaagtgatccacctgccttggcctcccaaagtgctgggattacaggtgagagcccaggagttcaagaccaggtgggaggatcacccagccttttctggtttctttttagagacaaggtctcactgtgtcacctaggctggagtgctggtgcgatcatagctcactggagcctcgacttcctgagtagctgggattaaaggcatgcaccaccatgcctggctaattttttatactttttgctgtagagacaggatctccctatgttgcccagactggtcttgaactcctgagctcaagtgatcctcctgccttggcctcccaagtagctgggaccacgggcgggtaccaccacgcccagctaatttttgtactttttgtacagacagcctcgatttcctgaatagctgggattacaggcatgcaccaccatgcctggctgatttttacatattttgttgtagagacaggatctcacaatgttgcccaggttggtcttgaactcctgggttcaagtgatcctcccactttggcctctcaaagcgctgagataataggtataagccactgcacctggccattgcttttatcctggataattctgcagccatggacagaagtgcacatacccatactcacaaatagctctgccacatgtgccagcatgagagcccatcacacaggtgaacgcctccctgtgaacacccatggccctctgtgtgctctcctgaacagccaggtacccacatgtatgctcaccaggagccaaaaacatgttattcactaacatgttaatcacacagaagccacacacttgcatccattcaagtaacaactgtgcccttccatgattaactctccacacccatttgttcagccgcctgtatccacaaacattcctacgctcctttcaggaggaactggcatctgtatatatctgtcagctgccatcttaggtctccccaacgaactcattagcattgcggtgaaacctgaaatattcctgcagaacttctgctctactaataagcctgatgtcctgctgaggtcacatggcacttacgagggctaatggagccagccttggccagcaaggtaggaaaccctggactcctggaatagccagagaatgtctggctatttactcccaagaataaacaaatttcctttccttctcactgcaccaagtgccccagccagcatctatctgcagaaccaaagtcatatttaagatacatttttggcctcaatactatcctggcatcacactaaaggctacatctacttgttattctactgaaggttgcattactctgatgggcactacactgggagctgcatcaccagatttgtcattatactgaaggccacatcactatcatgggcactacactgagggctgcatcaccagacttgtcattatactgaaggctgcattacctggttgggcattacactgagggttgcatcatcagacctgtctgaaccaccctgttagtcttgcccttaaggcctccaatcccaggctgagtattgtttgtgtgtgtgtgtgtgtgtgtgtgtgtgtgtgtgtgtgtgtgtgtgtgtgtgttttgagatggagtctcactctgtcgcccaggctggagtgcaggggcaggatctcggctctatgcaacctccgcctcccaggttcaagcgattctcctgcctcagcctcccacgtagctgggattataggcatgtaccaccacgcccagctaatttttgtatttttagtagagacagggtttcaccatgttggccaggctagtctcgaacctctgacctcaggtgatccacccacgtctgcctcccaaagtgttgggattataggcgtaagccaccatgcccagcccagtctgagtattatactgagggcttcataactagaaagctaaacttaacaggcaacactttccctcagcactggtagctcccctgtgtgtagtgtgaaggggcaagcagaagtggggttgagaagtgactctgaggggcctggtaggactagagagatgaggaaaactggggactctgaagccacacactgggggtgggaagccagaggacagaaaagcaactattatatcaagagttggaattctggccaggcatggtggctcatgcctgtaatcccaacactccgggaggccaaggtgggaggatcacttgaggacaggagtttgagaccagcctgggccacatagtgagctccatctctatgcaaaatttaaaaattagccaggtgtggtggtgcacacctgtagtcccagctatttgggaggctcaggcaggaggatcacttgaacacaggacgtcgaggctgcagtgagctatgatcatgccattgcactacagtctgggtgacagagtgagaccctgtcttgggaggaaaaaaaaaagttgaggccaggcacagtagctcatggctgtaatcccagcactttgggaggccaaggcgggtggactgcctgagctcaggagttcaagaccagcttggccaatatgttgaaaccctgtctctactaaaaatacaaaaaaaagaccgggtgcggtggctcacacctgtaatcccagcactttgggaggccgaggcgggcagatcatgaggtcaggagattgagaccatcatggctaacacggtgaaaccccgtctctacgaaaaatacaaaaaattagccgggcgtagtggtgggcgcctgtggtcccagctactcgggaggctgaggcaggagaatggcttgaacccggaaggcggagcttgcagtgagccgagattgcgccactgcattccagcctgggcaacagagcgagactccatctcaaaataaaataaaataaaataaaatacaaaaaaaattatccaggcatggtggcaggtgcctgtagttccagttactcaggaggctgaggcaggagaatcactggaacccgggaggtggaggttgcgccactgcactccagcatgggcgacagaatgagactccatctcaaaaaaaaaaaaaaaaaagttggaactcaaccttcttgagccactagtgctgaaggggccggaaagattcagattggctcctcttggaagctgtggatccttgtcctgtctctgctgttcttaccaggagcccctgccaaaaacctaccttgccatgcccttgagaagaaaagctttacctgcaagtacaggccttggcagcctggcacaggcgctataccctgagcagccccaacatgtgccatatcctcatatgtgctccacaagccccatcgcacctcaacagtcaggcatggctttgccacgctcagacattccgcacacaagacacgctctcattcactccaacacgtcccttgggttcagacacaactgatggccatcagattccccttacacgatggggcgtgcttgccatgaagacacgctcaaacatgctatgacacgctctgacacacaggggcacacacacacccaagcatgctttcacggggaccaggtaggtctccaacctctgccacagtctacacgcccatggccaccttgcccttccagatggattgatggggcggcggggagaaggctgttataaattaaacatcgagacactgtctgagcaccaggctctgccatccactcattggctggttccctcccaggaggctgcgggcacacagggtgggggagagggcaggggaagtggctcgcttaattaattagtcctcattgagatatctttgcaaatatccctttatcgaaggacaccattccatccgtttcctgggaatttgttgcctctatgtgtctctggcccctgagtatcgcagaaatgacaagacaagaaagagcgcgcccaagagctgctcaaaccttagctgtgtttctgatcacgacagcagcactgagggacaagcgggaaggctcagagattcagagatccaggcggaggggcagagagattaggcaaggggagatgcggaaactcaaatacaaaccgaactgcagagtcagagatacggactctgaaatgcaggaagagagagacgcaggcagagaaactttgcaactgggaggaccagagtggggacagatggacgtgcggctgggcagacaaacctcccctctgccttttcccgcctggcttggccttccccatctcctgggcaatccactctctgcagcggcaggcagcagtaacaatcaggcctgattccttttggccctagctaccctccccttccctctccctcccccaatcactcttgcaatcatctcccttgttcaaaatgagcttctgcagctgcagcccagacagctgttccatcttggagccagtactgggcctggtggctgggtcctagagggacgccctcctgagtggcagccggggagggggaatggtgctcgggggcagagggggcaaggggtcacccggagcttgggagcccacctccatctccagtcaacacttggccccatcaccagcatacccagggggtccagacactgccaatgcctctctttggggccctcaagagaggtggtctggggccgggcgtggtggttcacgcctgtaatcccagcactttgggtagctgaggcgggtggatcacttgaggtcaggatttgagaccagcctggctaacatgctgaaaccccatctctactaaaaatacaaaaattagctaggcagggtggcgcacacctgtagtcccagctacttgggaggccgaggcaggagaatcgcttgaacccgggaggtgattgagggagatcgcagtgggccaagacggtgccactgcactccagcctgggtgagagcgagattctatctcaaaataaatgaataaacaaacaaacaaataaataaataagagaggtggtcttggtcatcctgccctctgtcaccaaatccttcctaacatccaacacaggtcctggccctagaagcctctgccgtccaagaattctagtctgtttcccagggtccccgtcagggtcctatggtgagatggagatagaatcccagaggtagagacagacagacacagagagacatggagagacagacatgaatgagataaagagacagatataggccgggcatggtggcttatgcctgtaatcccaacactttgggaggccgaggtgagtggatcacttgaggtcgggagttggagaccagcctggccaacatagcaaaaccccatctctactgaaaatacaaaaaattagccaggcctggtggtgcatgcctgtaatcctagctacttgggaggctgaggcaggagaatcgcttgaatccgggaggcagaggttgcagtaagcaaagatcgtgccactgcactccagcttgggcaacagggtgagacttgatctcaaaaaaaaataaaataaaatttaaaaattttaaaaatctaaagtccctgaaagatccccctccccacgacatgatatggctcccatcaccttccttccctcacctcctctccctcttccgctcgctcactatgctccagacatgggcctcctccctgttcctccaacatgccaggcgtggtgcgatcatagctcactgtagcctccaactcctgggctcaagcaatcctcatgctttagcctcctgagtagctgggactacaggtgtgcaccaccatgcccagctaattctttttatttttcctctttttcttttttttgagatggagttttgctcttgtcacccaggctggagtgcaatggcgcgatctcggctcactgcaacctctgcctcctgggttctcctgcctcagcctcctaagtagctgggattacaggtgcctgccatcacacctggctaatttttttttttttttttttttttttttttttgagacagagtcttgctctgtcacccaggctggaagtgcagtgatgcaatctcggctcactgcgagctccacctcctgggttcacgccattctcctgcctcagcttcccgagtagctgggactgcaggcacccgccaccgtgcccagctaattattgtatttttagtagagacggggtttcaccatgttagccaggatggtctcgatctcctgacctcgtgatctgcccgcatcagcctcccaaagcactgggattacaggtgtgagccaccgggtttcaccatgttggccaggctggtcttgaactcctgacctcaggtgatccacctgccttggcctcccaaagtgctgggattacaggtgtgagccaccgtgcctggctaaaaatgtattttcttttggggttttgctatgttgtccaggctggtctcgaactcctggcctcaagcaatcttcccaccttgacccctcaaagtgctgagattacacatgtgagcccactgtggtcagcctattttaattttttgtagagacaggatcttgctatgtcgcccaggctggtcttgaactcttggcctcaagcaatcttcccacccctgccttccaaagcttgagaattataggcatgagccacagtgccactctaagagccttttgctgagaactgctcagctcctccttattcgtcccataaagcaaaaggtccccctcaaatagcacacccctcctccatctccccttccctctctccagccccccaggcagaggcgacggtcaagggtataacatacaagattcaggtattttacttcaggcctcgaaatgatgtccgtggctggcaatacagctgacagctcttagtctggtcctggatttatgatccccaggtgagaagccattccgctgaaggctcctgtcccacagggatggtttatggctgggagttggccaaaggtagtagcggcagcttcctccccacgtcttcccagagatggtctataaccacaggaatgctaagctgcttctgcaattcaggaggaggaagccagagagaagcaggacccccaaggctctacgctcaccgccccacaccactgagttcctttttaaagccaaacaccagcatccaaccttccgcctcctgactttgggaatccatactgctttgtttcctgaacccctcagcctccccgacgttggggtgctaaaccttccgacatctcctcctaaccgaacacctactgtgtgcctggtcactttccatttgttctccccagtcctgaggaaggtgaaatggatttagacacttgagaaatgtttattccaggcttggctagaggggtaaataaaacaacccctccttactaaacactactatgtgcccgttatttatttgtttttgtttgaaggaggaatccacaaatccttatgaaggtgtgattgtggattcagtcattggacaaatatttattgtaggcctatgtgcgccacaccttagggttcagtagtgagcaaaacacagatgtcttcaaggatcttaccatctcataaagactctaaattccccctgactaataaggaaatcgaatcccagcttcttaggaggctaagacaggagaatgacttgagcctaggagttccagatgttagtgagctatgatggcatcactacactccagcctgggtgacagagtgagactctttctctaaaaataataatattaataataataacaataaggaagttggggcttagagaaattaaataatttcccccaaagtcacacagctagtaaattacagggccagaattcaaacccagatatgtttgactcaaaaatcttatcactaactgagcatctgctatcttaggcactgagctgggggttttcaaacataaaaattcttgacatagaagaggcacttgatagtcttgtggaataggccaggcactggtggctcatgcctgtaatcccagcattttgggaggccgaggagggaggatcccttgagcccaggagttcaagaccagcttgggcaacatggtgagactccacctcttaaaaaaatagttttgtggaataaatacaatggatggaaggatagatgaatggatggagaggcagatggatggtggaaggatggatgcacagaggatagaaaaagagagttggataatggataatgcatgcatggaggaattggtgaatgcatggatagagatggatggatagaagaatggatccatgaaagaacagagagacaaatgatgcatcatggatagatgaaaagagatgggtggaaggataaagagatggatgtgtgaaaggatggatgtacagatggatggacagatggaatagtgggtgggtgtatgagtgaatggatggagagaaaatggatgggtagatgaaataattgatggatagatggacagactgatggaataacaggtggttggatgaatgaatgaatggagatatggatagcaagacagatggaaggatgggcgtaaaaacagatggatagatgaaataatagatggagggaaggatggatggatggatgaagagatatatggaagcgtggaaggatgggaatttgaacagcagatctctgttacccacaacaattctgtgaggtaagacatcattcccattttatagatgagaaaacaatagctcagagtgacaaaggcactggccagagtcatagagcaagttggggacaaaatctagattccaacataggtctttcagactcccaaaatggacaccctcatgtcacagtcccctcccagccctcaccctgagtaccttaacatctcacttctcagatcccttttgacaaagtataatgagactgagggatggggtggtgtcagggatgggagggccattggctttcagcaggtgaattcatggaagcattggatgaagatgctgttagctacgaatgggccagagtggagatcaggtctgtttgggcacacacacatacacacttacagaaaacacacagcacacagggcatcctacccacatgcacacaaggcaggcacacacacacactttcataaatacacacttgcagttatatgcacacacttacaaagacatacctgtccacacatatgcacacaaagatacttgcacacacgtttgcacagatacatatgcacacacaaaatcataactcatagacatgctcttatatacttatttatacattctgcagacacaccatatgcacacatttacacacacctgcatagaacacatgtacacagactcacttgctttcaatggtggtagagggaaatttggcttctgatttcaatgagataccatctctctcccttctcagatggcaacggcaagaagcctgtatcatacttgtgtataacaaactcatatgcacacatgcaatcttgtaacacaggcaaacccatagtcagggacaggcaattgcagatacacatgctgatacgtccacacccaagcacagtcactcagggacacacccacactcattctgggatgcaccctcacacacaggaaggcacatcggaccccatgccggcagtgcacataaactttctccactcccattcccccatatacacaccgaaacacacacatatagacacaccaggacatacccaaataataaacacttaatgtgacagacacacagaaacacaccgtctcacacattggctgccaagtctaagaatctagcctgaaagctctcacctgtgtcaagcccaataccacccccaccaggggctggacaaagccttctcaggtgtccccaccaccaccacacacccttgccttcgaccctagggagcaaattcttctttgctcccatcaaggagaaagaagctgcgggatgaccatttggggctaagcaagggagggttggtgaagttggggctaaagaaagggagccccaggcatcgcagcctgggtttgggggatgatttgggaggagccccccaaacagatggaacaggggtggggctaccagaggttgaggagtggggggaaaggcatatctggaggaggcccagggaagtttgcagtgaaggaaacccctcccctctctcctcaggacaccacggggagaaccccactgagttctctccttcttccctgatccagggaagctctgtagtggggaagctggaggataaagcctcaaagggggatgggatgggaaggcgccatcctggagcttctggaggcagtgtcagctccggccccagtctgcgccccgtctacctcccagggagggtgagttatggggataaatattcagcacatggcgaggcaagaatggcggaaggggtgcaggggagagaaaaagagagaaaaaaagagatacaaattctcagcgccacagagacagagacaaggaaagatagaaatattaatagaaagagacccagagacgcaaagcaggggaaatgaatagagactcagacagaactactcagagacgccgagacgcaaccaggcagagaccttgaaggtggagacactcggaaacccctcgatcctcccctctttcagagacagggtccttctaaacccccgagtctcaccctcctcccgctgcaccccactcagcccggactcagctcaattctgcagcccttgtcgcctccgccctggggccggagcgagcctggtacgctattcgcgctcagacattgctcactaataatcataataatcaataataacagcaagaaccatcctaaatggcgcggaggtggctaggggtcccggggctccttctgcctccacgtccgaccctggaaccccgagagggcgtcccctacccaggcgtgccgggcagggtcgtgggaagcacaggggtagagggggacaggtgggggccccgggggctgcggcggcggcagcggctgtggcgcgggtaccacgccccccgggagcgccccccgcgcggcggccactcacgattttctcagaggcgcccgcacgggacacggtgccgttgagccccacgagcgagggcagcgtctgcgacatccagttggtgaccatggccatggtgctcagcacggccccgatcttgagcagcggcaccgacatcgcgcctccgcctcatgccccgcggccgcccgccgcgcgtcccttctctggcccgccgcggggcgctcggtccctcgacacccaggcgccccgggggggcgtgggggagggggcacgagcgcgagctgcggggcagggggtccgggacggggtgagggggggctcggggacgcgggctgcggctcggcgcgcctggcgggctcctcttataaagcgccggctcgggcccccgccccctcccgcgcctccgcgccgggcacttccagccgccgtgacgtcacgcctccggcccggagcccggcggggggcggggggcgcccagactgcccccaccccccaccccacgccctcgcccgccccccgccgaggacctctccatggggtgggggacctccccctggtggcattccccaagcgccccaccaccaccgcggtggcattccccagccccgccccccaacggtattcccggcccccctccccctaggcggtgttcccggaccgcctcccgcacgcagaccctcttcgagcctgagccgcgggaccccgcgcgtaaaggcgccctcggcccaccccggccacccaaagacggcagggggccggagtcgcaaatccccacccacccactgttgggacacccaccctggctacctaaaacctcggacagcgggcattggggggcgtgggggggcgacacgctcgtgcgctcccatgaatcgggtcaccaagggtctcctttagctgggggaaggggcttccttcccgggcactgagaccactctaaggatccttcggtcatttcgtgcccccagggtggcgtgatccagggccagcagacgaaattgtttgggtgcaggtgcggtcctggggtcacttcggccacgggaggagttcccacgactaccaagggcagtttcctacccagggaccacggagacctggcacgcggcttttaggaggcgagtcccgggcaggtgtctacttgcaactttaactttgggtgggggcggggcactcacgcttcggaccttcctcgcggccccggggaccccgctcccggcccgctccctcgggggagcgggaagcgcagtgccctcgccgcccacccgtccgcccacgcatcagccggcggcggcagccgctgggccgcggagaggagcgccgggctagttttaatttcctctgttttgcctgcactcacgccccctcctggcgtccccgcatcacctcgctccgccgccgccgtcgccctcagcccgcggccgccgccgtctggaggcggcgatgactcaggcctttccaggcggcggcctggggctgagggctctggctggggaggagcgccaagcatgagcggggaggggggctaggggtctcgaaccgtctttttttctgagctggacaacaccaagatgcaagtgtgacctgtagggatgactgttcctctctgcctcagtttccccatctgcaaagtgggtggtggagacctaacacgtgtaaagggcttggtcatcctgagaatcaggtaatttactgagcatctactatgtcccaggcactgtgaacaacagacaaaaatgcctgcctgtgtgaaattgaatattctttttcttttctctctcttttttttttttttttggtagagatgggcatctcgctatgttgcccaggctggtctcgaacccctggcctcaatcgatcctcccaccttggcctcccaaagtgttggcattccaagaatgagcctccgggttggatgtgaagatgaatattctatggggtgagacagtcaagaaatacgggaaaaaagtaaagtacataagatattaggaggaaggggaagtaaactttaaacagagtgattggagaaagggacttttttatttatttatttatttatttatttatttatttatttgagacggagtcttgctctgtcgcccaggctggagtgcagtggcgtgatctcggctcactgcaagctctgcctcccgggttcaggccattctcctgccttagcctcccgagtagctgggactacaggcacccaccaccacgcccggctaattttttgtattttttagtagagacggggtttcaccgtgttagccaggatggtctcaatctcctgacttcgtgatctgcccacctcggcctcccaaagtgctggaattagaggcgtgaaccaccgcgcctggcgagaaagggacgtttaagcagagacctgaagtgaggaagggaaccatctggatatctaggggaagagagttccacgcaacaggaacagcaagtgcaaaggccctggggcaggagtgtttgaggaccaggaaggaggccagtgtagttggagtgagccagggggagaataaggaatgatgatgtttgtaaaatactttacaagtgtctgggacatggtaagtttttcaaatagtagctaccattgttgttattatttgaggccgggcacagtggctcatgcctataatcccagcactttgggaggccgaggagggtggatcacttgaggccaggagttcgagaccagcctggccaacatggtaaaaccctgtctctactaaaaatacaaaagttagccgggtatggtggtgcacgcctgtaatcccagctacttgggaggttgaggtgggagaattgcttgaacccaggaggcagaggttgcagtgagccaagatcgagccactgcactccagcctgggcgacagacgagtgagaccctgtctaaaagaaaaaaaagatgagttcttgccagcttgttctaaagctttcactgatgagtgctgaacactttgcagatgcaatgttaacaactgctgcaacatccataaacagtacagtgacacccctatttccaggtgaggaaactgagctcagagaggagagggacccagatcaggggaacccagcagggaagtgggggcccaggttttgaaaccaggactgtctgatttcagaccctaagaccaactgggctccaggcctcctggcttagacaatttgggacccaaacaaactttctcactctctggccatgggtgctgtgggaaactgccttagttcagcgcatccaggcttctccaaggagtggtctgtgctcgagtttgcacttgcttgcatttaactccttgcctcccacctccccaacgtttccaaaactcttctcaccaaaggtgccaatttgccaggtccacaccctcatgccagtcctcattagatcattctcacagtcagtcagtccccactcaccatcaccttcttgaaactcctttttcccttgacttcagagacacggtatcacttcctagttctgcacccacctctctggctgtgccgtcgctgtctcctgctactccctaaaactctgtatctttcagggctttgtcctgggttccctgccgctctcattctgcctggaccatcacacccactctcaaggttttggctccatctgggacactgcaacctcaggacctttgaacttcctgttccttctacacaaaatacatcaaggatgccccccatggcttgttcctttacttaattaatgtattttttagagacagagtcttgctctgtcacccaggctggagtgcagtggttcaatcatagctcattgcagcctctaactcctaggctcaagctattctcctgcctcagcctcccaagtagctgggactacagatgcgagccaccattcccggtcctttatttaatttatatctctgctctgtcattgtgtgggtcagagccatgccctgcccttcccccagaaaactacatttcccagattccattgcatactggcttcctggtcggtttatccaatgggagccactggagggagatcggagattggagaggaaggcagaagccagggtgtttctctcctgtgtctgcttggggtggagggtgttttctgacagtggctacacctcctccatagtgccagttcctccccaagggtcccttccttatcacatcctctctttgccatgtccctccagtagctttctgctgtagcttatgccagatttcctcatcatcccatgtggcttctcaactctttcttctcccacttaaccaattccctgtattaaatttcccctctctgaaacacgtagtttgtttccctaacaagaccctcagtgatatggtgatcttatccaaaggaccttccctggccacctcatctacaatctgaacaccccaccactctgtgccacttaccctactttagttgttttttgttttgttttgttttgagatggagtctcgctctgttgcccaggttggagtgcagtggtgaaatctctgctcactgcaacctccatctcctgggttcgagtaattctcgtgcctcagcctcccaagtagctgggtttacaggtgcatgccaccatgcctgggtaatttttgtatttttagtagagatggggtttcaccatgttgaccaggctggttttgaactcctgacctctagagatccacccacctcggcctcccaaagtgctgggattacaggcatgagccaccatgcctggccactttagttcttttatctttttttttaaggcgaggggctgggcactctgttgcccaggctggagtgcagtggtgcaatcatagctcactgcaacctcaaactcctgggctcatgtgatcctcctacctcagcctcctgaataggtgagactacagaggcacaccaccgtgcccagctaattttttaagttttctgtagagatggggtctcactatgttgcccgggctggtctcaaactcttgggctcaggcaatccacctgcctcagcctcccaaaatgctgggattgtaggcataagccaccacgccagaccctaaaactctttttaaagacccagcaattccatctacccaagagaaaccaaagcatatgtctatgaaaagacctaaacatgaatattcatagcagcattggtcataatgaatgaaacaatccaaagacccatcaactggtgagtgaataaacaaattgcggtacatccatacaatggaatgccattccaccataaaaaggaatttgctcctgatatatgctacaatgtggatgatcctcaaaaacattttgctaagtaaaaggagccagacgcaaaagaccacatagtttatgattctatttatacataatgtccagggacagcaaatcaatacagacagaaagtagacgagagattgcctgcaagtgggggtgggagtggagatggaatgcaaatgggcacgggggctgttttggaggtgatgaaaatgtcctaaaattggatcggggtgatggctgcacaactctgtaaatttacgaaaagtcactcaattgcacgcttacacaggtgaattttatgctctgtaaattatacctccataaaactgctgaaaagggaagatccaccaggcacggtggctcacgcctgtaatcccagcaccttgggaagctgaagcgggagaattgcttgaagccaggagtttgagaccagcctgggcaacgcagtgagacctcatttctctctcttttttttgagatggagtctcgctctgtcacccaggctggagtgcaatgggatgatctcggctcactgcaagttccgcttcccaggctcatgccattctcctgcctcagcctccggagtagctggggctacaggcgcctaccaccacgcccggagaattttttatatttttagtggagatggggtttcactgtgttagccaggatggtctcgatctcctgacctcgtaatccacctgcctcggcctcccaaagtgctgggatttacaggcatgagacaccttgcccggccgagacctcatttcttcctattcatttatttatttgagacagagtctcgctctgtcactcaggctggagtgcagtggcctgatcttggctcactgcaaccttcccctctgggttcaagtgattcccttacctcagcctcctgagtagctgggattacaggtgcacgccaccacacctggctagtttttgtatttttagtagagatagcattttgccacattggccaggctggtctcaaactcctgacctcaggtgatcctcctgcctcggcctcccaaagtgctgggattacaggcataagccaccacacctggaccactgccatttttttttttttttttttttttgagacagagtcttgctctgtcacccaggttggagtgcagtggtgagagctcggctcactgcaatctgtgcctccagggttcaagtgattctcgtgcctcagcctcctgagtagctgggattacaggggcaagccaccatgctcagctaatttttgtatttttttttttttttagtagaggtagggtttcaccatgttggccggctggtctcgaactcctgacctcaggtggtctgcccaccttggcctcccaaagtgctaggattacagctgtaagccaccacacctggcccctccccaccaaaaaaatttttttaagtagctgggcatggtggcatgtccctgtagtaccagctacttgggagactgaggtgggaggatcgcttaagcccaagtgtttgaggctgcagtgagctatgatggcacctctgcactccagcctgggcaacagagcaagaccctgcctgtacaaaagggggaggcatttttaaactttacttgcaagctccctctttgaggtgccctgcactgtactaacacaagaataggtgtctccttaaattttgagcccaagattccttgcttgcatcaccctggtcctggcaatgatgtacccacggtcagaaatgagagattatttactttttacccctccttctccatcactcctcttctattcaaaccagcaccagagccagctaatcctgatgcagaaatatctcaagaaagtgtcccctcttccccatcatcatcactgtgaacatcgtgctggtaagccactgaaaaaaaatgtttcttctggggctaggcgcggtggctcatgcctgtaatcccagcactttggaaggctgaggtaggcagatcacttgaggccaggagttcgagaccaccctggccaacatggcaaaactctgtgtctactaaacatacaaaaaaaaaaaaaaaagtagccaggtgtggtggcacagacctgcaatcccagctacttgggaggctgaggcaggaaagttatttgaacctgggaggcagaggttgctgtgagcagagatcacaccactgtactccagcctgggcaacagagtgagactccatcttgaaaaaaaaaaaagtttatttcccttgaaatttctgggtggtaaaaaactcgtaactgttggaaaaatatcaataattgctgagatttatttagtactatcatgttccagacaccatttgcagcaaagtacatgtaacaactcatttaaccctcagaatacctatatgcaacagacagaattataattttcttttgtttgttttgggattttgttgttgttgttttgagacagggttttgcctaccgtcacccaggctggagtgcagtcacatgatcatacttcactgtagcctcaacctccctggctcaagcgatccttctgcctcaaccttccgagtagctgggactacagtcacatgccaccatgcttggctaatttttttttatttttggtagaaacagggtcttgccatgttgcccaggctggtctcaaactcctgggctcaagcgatccccttgcctcagcttttcaaaacactgggaagacaggcatgagccactgcacccagctaggcaaaggtttttaaaataggacactaataagcactagccatgaaagaaaaaattatttgaactacattaaatttttttttttttttgagacggagtctcactctgtcaccgaggctggagtgcagtggcatgatcttggcttgctgcaagctctgcctcccgggctcatgccattctcctgcctcggcctcccaagtagctgggactacaggcgcccgccaccacacctggctattttgtatttttagtagagacggggtttcaccatattagccaggacggtcttgatctcctgacctcgtaatccgcccacctcggcctcccaaaatgctaggattacaggcatgagccaccacacccagcctgaactacattaaaattaagaaatcctggctgagtgcagtggctcacgcctgtcatcccagcactttgggaggccggggcgggaggatggtttgaacccaggaatttgagaccagcctgggcaacacggtgaaacaccatctctaaaaaaactacaaaaattagctgggtgtggtggtgtgcacctatagctccagcaactcggcaggctaaggtgggaagatcgcttgagcccgggagatcgaggctgcagtgagccgtaattgcaccactgcactccggcctgggcaacagagtgagaccctgtctcaaaaaaaaaaaaaagaaatgaaatgaaattaaggaattctattgattaaaagacaccactaagagaatgaaaagaaaagctacagagaagatatttgcagtcattatgtccaataaaaatctcatatcctgattttatagttatgtaaaatatgaatatgtatctatgtaaaatctagatacacacacacacacacacacattcctacaaatcagtaagaaaaaaccagacatctgaacagagaagtgggcaaaagacttagacatttcacaaaagtggatatccaagttgtcaataaacatatgcaaaggcacttaattcatcatcaggcacatcactcatcatcaggaaatgtaaatgaaacccacaatgttcccagcactttaggaagctaaggtgggaggatcacttgagcccaggagttggagaccagcctaggcagcataaccagaccctgactcaaaaaaacaaaaataaatttataaataaacccacaatgcaatactatttggcacccatcagaatgtctaaaactaaaaaaaggccaggcacagtggctcatacctgtaatcccagtactttgggaggccaaggtgggtggattgcttgagctcaggagttccagattagcctaggcaacagggcaaaaccccgtctctacaaaaaaattcgccaggagtggtgctgcatgcctgtggttctagctacttgagaggctgaggtgggaggatcgcttgagcctgggaggttgaggttgcagtgagcacagatcgtgccacagcactccagcctgggtgacagagtgagaccctgtctcaaaaaaaaaaaaaaagaaagaaaaaaagaaaagaaaagaaaaagaaagacaacaccaagtgttggggaggatatggagcaactggaacacttcatacactactggtggaagagttgttgactttttggaagagtctctgaaactttggaagactgtacagcagtttctccctatgacccagcaattccactcctacatatatacagttgagcttcatgattcgaaaattccagattggcaaatttgcctacttgttgcaatttgtttatactctaagatcaatactcgctggggcatttgtggtcatttgtggacatgcacagtgataattttttttttcttgcttagaaacagggtggagtagctgggcacggtggctcatgcctgtaatcccagcactttgggatgccaaggtgggcagatcacttgaggtcaggagttcaataccagcctggccaacatggtgaaatcctgtctctactaaaaatacaaaaattagccaggtatggtgggtgcacacctgtaatcccagatgcttgggaagctgatgcacaagaattgcttgaacctgggaggcagaggttgtagtgagacaagatcatcgccactgcactccagcctaggcaacaaagtgagactgtctcaggaaaaaaaaaaaaagaaagaaaagaaagaaagaaagaaggaaagaaaggaaagaaggaaagagagagagagagaaggaaagaaaaggaaaggaaaggaaaagaaaagaaagaaaaaagaaaagaaaagaaagaaaaaagaaaagaaaagagtgcagtggtgggattgcctttacctcctgggctcaagcgatcctcccaagtagctgggacttcaggcatgcagcaccacacttagctaattaaacaaattttttttgtagagctgggcgtggtgcctcacgcctgtaatcccagcactttgggaggctaaggcaggtggattacctgaggtcaggagttcgagaccaacctggccaacatgtcgaaaccccatctctactaaaaatacaaaaattagccgggcttggtggtgtgtgcctgtaatcccagctactcgggaggctgaggctcaagaatcacttgaacccacgaggtggaggttgcagtgagccgaggtcgtaccactgcatttcagcctgggcaacagagcaataacctcgtctctacaaaaaaaaaaaaaaaaaaaaaaaaagcccgggcgcagtggctcacacctgtaatcccagcactttgggaggccaaggcaggcagatcacgaggtcaggagatcgagaccatcctaacacggtgaaaccccgtctctacaaaaatacaaaaaaattacctgggcgtggtggcgggcgcctgtagtcccagctattcgggaagctgaggtaggagaatggcgtgaacccgggaggcggagcttgcagtgagccaagatcacaccactgcactccagcctgggcgacagagcgagactctgtctccaaaaaaaaaaaaaaaaaaaaaaaaaaattgtttttgaaatggaggtctcgctctgtcgcccaggctggtctcgaactcctgggctgaagccatccttccgccttggccacccaaagcactgggattatgggcgtgagccattgctcccggcctgacaacatactcagtcacccaaccctgttgaggtctaataaggagacactctgctttcttcctccagctctgatactacatgcaagtgtcttttttatggtccatttagtgccaagcttttcatatttttgtgctgtttgttggtgactctgctatcttcagtggcccccacgcaccgtgctgaagtgtagtctagtgtttctaagtcaagaaggccgtgacgtgtgtcacggagaaaagacgtgttacagaagcttcattcaggcatcagatctagtgctattggccgggagttcaatgttaatgaatcaaaaaataaatatatatgtgatatatatatatatatgcgtgtatatatatagatatgattgatatatatatatgatattctaaaacagaaacacacataaaacaaagttatggctgggcgccgtggctcatgcctgtaatcccagcactttgggaggctgaggcaggcagatcgtttgagcccaggagttggagaccagcctgggcaacatggtgaaatcctagctctacaaaaaattagccaggcctggcggtgcatagtcccagctactcagcgtgttgggaggctgaggtgggagaatggcttgagtccggaaggcggaggctgcagtgagcctagatcacaccaccgcactctagcctgggggacagagtgagaccctgtctaaacaaaacaaaacaaaaaaagttatatattattcagttgacaaaaacgttgtggtcagaggcttttgacaaaaatagcaagtgttggtgaggatgtggaaaaataggaaccctttgtgggaatgtaaaatagcgcagtcgccgtagaaaacattatcgtagttcttcaaaaacttaaaacatagttaccatatgacccagcaatactttttcttttttgagacaggatcttaccctgtcacccaggcaatggtacaatcatggcgcactgcagccttgacctcctgggctcaagtaatcctcccacctcagcctcccaagtagctgggaccacaggcacagctaatttttgtatttgttgtagagacacggtttcaccatgttgctgaggttggtctcaaactcctgggctcaagcaatccacccacctcagcctcccaattgctgggattacaggtgtgagccaccgcgcctggcccagcaatgccacttctgaatacgtacacaaaagaattgaactcagtgtctcaaaaagatattggtacacccgtgatcatagcagtattattcaaaaaagcccaaaggtgaaaacaaccaggccgggcgcggtggctcacacctgtaatcctagcactttggaaggctgaggtgagaggattgcttcaggccaggagttgaagaccagcttgagcaagatgacaagaccccatctctacagaaaaaatttaagaattagccagccgtggtggcatgcacctgtagtcccagctacttgggaggctgaggtggaaggatccctggagcccaggagatagaggttgcagcgagctgtgatggtgccactgcactccagcctgagtgatggagagagacctcctctgtaacattaagacttttttttaaaaaaaagctgaaaacaacccagtgtctatttattgatgaatgaatggataaacaaaatgtggtatatccatacatggaatatgattcagcctttaaaaggatggaaattctaggccaggcatggtggctcacgcctgtaattccagcactttggaaggctgaggcgggcggatcacgaggtcgggagatcgagaccatcctggctaacatggtgaaaccccatctctactaaaaatacaaaaaattagccgggcgtggtggcggccgcctgtagtcccagctattccggaggctgagatgggagaatcgcttgaatctgggaggcggagcttgcagtgagctgagatcgcgccactgcactccagcctgggacagagagcgagactccatctcaaaaataaataaataaataaataaatgactaaagtgataaattttatattatgtgtattttaccacaattaaaaatttttaaagtcttccatttaaacatgcacaacctcttctatgagtcactattaccagctcactaaattctaggccaagtgcagtggctcacgcctgtaatcccagcagtttgggaggctgaggcaggaagatcttatgagcccaggagttcaagaccggcctggacaatatagtgagaccctgtcactacaaaaaataaacaaaaaaaattatgtgggcatggtggcacacgcctgtggtcccagtgactcaggtggctgaggtgggaggattgcctgagcacaggagtttgaggctgcagtgagctgtgatcgcgtcactgcactccagcctgggcaacagagcaagactctatctctaaaaataaataaataaggtccagcacggtggctgacgcctgtaatcccagcactttaggaggccgaggcaggcagatcacgaggtcaggagtttgagaccagcctggccaacatggtgaaatcctgtctctactaaaaatacaaaaattagccaggcgtggtagcacgcgcctgttaacccagttccttgggaggctgaggtaggagaattgcttgaacctgggaggggagggttgcagtgagctgagatcgcaccactgcactccagcctgggcgacagagcgaggctctgtctcgaaaaaaatataaataaataaatgaataaataaattctaaaatccttaacccagctttcgaagcctttacagtcagatcacaaccttttcaagctcacttcccttctcctatctgcacccaccataggcatcaaccacacacttaccctagttcccatttccagaaacttcccctcttttaaacatggttagaatcatgtaaaataagggtaaacccaccaggtcttgtcagcatgaccaatgactttcttctgtgtccaccctccagtcttcactcgctcatccttcaaggcccatctcaaatgccacctcccccaggaagcccacttgactcttgacatctggcactttgtaccatgtgtcggctgcatctgtctcccaaatttggcaactgacagccattcagagcggactgtgtcacgtccctcctgagtgagtgagtgcctctatcagtgtctttctcatagaaattactagagaaattaggaacagaaacaatgtgggccgggtgcagtgactcatgcctgtaatcccagcaccttgggaggctgaggcggatcacttgaggtcaggagttcgagaccagcctgaacaatattgtgaaaccctgtctctactaaaaatacaaaaattagctgggccctgtggctcatgcctgtaatcccagcaccttgggaggctgaggcaagaggatcacttaaggccaagagttcaagaccagcctgggcaacatagtgagacccccatctctaccaaaaaaaagaaaaagaaagagaaaaattagctggatgtagtggtacacacctgtagtcctaactatttgagaggctaaggtaggaggatcacttgggccaaggaggttgaggctacagtgggctgtggtcacaccactccactctagcctggtcaacagagcaagaccctgcgtcttaaaaaaaaaaaaacaaaataaaatttaaaaagaacccggctcaccatgtgctcatcatgtattcttcctgggattcaccaggactctcttagagcctaaaaagtgagaagctatttgccatttcatttgatggctgaactggctttgcctttttgtttctttcttcttgtgcaatgacacctgtcttctcatctattaagcaaggctagttactagctgcccaggattgttggaactatgtgtaaagtaagagtaaactgggaccgagagtctactgggtccccaggagcaacaagaacaaccttttccaggctggatgcagtggctcatgcctgtaatcccagcactgagggaggccaaggtgggtggatcacttgaggccaggagttcaagaccagcctgggcaacatggcaaaaccccgtctctattaaaaatacaaaaactagccaggcatggtggtgcacgcctgtagtcccagctacttgggtggctgaggcatgagaattgcttgaacccaggaggcagaggttgcagtgagatgagatcgtgccactgcactccagactgggcgacagagtgagactctgtctaaaaaaaaaaaaaagagagaaagagaataagcttttgtatacagtcttcatggaatctactctccctactctctgctctttcctggtgacttcttggtttgtggctgcactctggatggatgaagttgcaagacacactgaggtggtgtgcacctgtaatcccaactacttgggaggctgaggcaggagaattgcttaagcccaggagttcgaggcctgcctgggcaccatggcaagaccccatctcaaaaagaaaaaaagagatagaatgggcttccaccttggcagggaggacatgtcaatgttctcagacaagagttccctagatatgggaataaaatgttcctgtcatgacaagttttttcccaacacagccagactcaactcctccagaagttaaatctactccaccccttgaaagcacaaactaccacccagtgcttgttgcatagtacaacgcttgagatacagaaggctctcaatgaatgctctctaaatgaatacatgggccgggcgcggtggctcacacctgtaatcccagcactttgggaggctgaggcgggtggatcacctgaggtcaggagtttgagaccagcctgaacaacaatatagagaaaccctgtctctactaaaaatgtaaacattaggtgggtgtggtggtgtgtgcctgtagtcccagctacttgggaggctgaggcgggagaagagcttgaactcgggaggtggaggttgcagtgagccgagattgcaccacttcacgccagcctgggcgacagagtgagaccccgtctcaaaataaaataaaataaaataaaataaaataaatgaatacatgcatgtaggaacaaatgaaaacagcacattactgtctctcaggcactaacactgaatcctggggctacaaagtcattgcccacaccagccactgggctcatcagaaacccacacataccaggccaggcgtggtggctcacgcctgtaatcccagcattttgggaggctgaggcaggcagatcacctgaggtcaggagttcgagaccaacctgaccaacatggagaaccctcgtctctactaaaaatacaaaattagctggatgtggtggtgcatgcccgtaatcccagctactcgggaggttgaggcaggagaatcacttgaacccaggaggcagaggttgcggtgagccgagatcgcgccactgacctccagcctgggcaacaagagcgaaactccatctcaaaaaaaaaaagaaagaaagaaagaaatccacacataccatatggttggcctacatggatacagtcactggtgtgatgatgatacaagcatgtccctgtgctcatggtccctgaacatgcacacagtcaccaaacatacacatacacgcatgacaccacagacacatgcctatggggccaaagttagagtgaggcaagttatgcaagtgcagagggggagcccatatttatttaaaaatttgtttttattcattatagatttttcttgcatcaatttagatttttcttaaaatgttccattaaaatattatttatcttggttactggtttttatttttttggggggcatacccttaaattttgtactatagctgaactctgtaccatgtacctgtcaccctagctactcaggaggctgaggcagaagaatcacttgagcccaggagttggaggcttcagtgagctatgactgcaccactgcactccagcatgggtgacagaacaagaccccgtcttagaaataggcccggcaccgtggctcacgcctgtaatcccagcactttgggaggccaaggcgggcagatcatctgaggtctggagttcgagaccagagtgggcaacgtggtgaaaccctgtctctattaaaaatacaaaaaaaaaaaaatttagccggctgtggtgctgtgcgcctataatcccagctactcgagaggctgagcaggagaatcgcttgaacccgggaggcagagattgcagtgagccgaaatcgcaccactgcactccagtgtggacgacacagcaagactctgtttcaaatatcatcatcatcatcatcatcaactttttaaaatgtttgcacccgcggcgagtatctcacctgttttaccctgacctgggcacccccatcccacatacgcacgcgcccacgcacaggtgcacaaccacacacattcacccaccagtcacacagacgcacacagtccctgcacaaacctcactcgaccactagatgtcgctcaagctccataatcttaaatccagccccaaggggctctttcctacactaactcggagtctttaaatttccttttacttccctccactgggacatttacatgctctaaaggagccccaggagaacatcgtcttacccctaaacaacagtgccctatcggtggaatgtcaggcacaggtaaagaagatgggttttctttctttcttttttgtggagacagggtctcagtctgtcgcccaagctggagtgcagtagtgcaatgatagctcactgcagcctcaaactcctgggctcaagtgatcttcacacctcagcctcctgagtagaactacaagcctggccaattttttttaaagttactgcagaggccgggcacggtggctcacgcctgtaatcccagcagtttaggaggccgaggcagacaaatcaagatgtcaggagttcgagaccagcctggccaaaatggtgaaaccccatctctactaaaaatacaaaaattagctgggtgtggtggcacgcccctgtagtcccagctactcgggaggctgaggcactagaatctcttgagcccgggaggcagaggttgcagtgagctgagatcatcacaatactgtactgtactccagcatgggtgacagaacaagactccatctcaaaaataaaaaaaaaaaaagaaataaaaagaaaaagttattgtagagatgggatcttgctgtattgcccaggctggtctcaaattcctggcctcaagagaccctctggctttggtctcccaaaatgctgggatcataggtatcagccatcacacctggcctgaagaatggattttcttggtgccttccatccaggagcgagtgttcccctgacactctcttgataaaagaatcctgtggtttgagaaagaaagacactctgtgtgtgtgagggggtccatccatccatccattcatccattcagcagatatttcttgagcacctactgtgtgtcaggctctgctctagacactggagaaacaacaaagctagctgaaccctgataaactgccgctctagtggggaaacagagaatgaatgaatagaagaatcatagaaatgtggaaacgagggctataaagaaaaatatggccgggcgtggtggctcatgcctataatcccagcactttgggcggcagatcacctgaggtcaggagttcaagaccagcctggccaacatggtgaaaccctgtctctactaaaaatacaacaaaaactagctgggcatcaggtggcacgtgcctgtagtcccagctactcgggaggctgaggcacgagaatcacttgaaccggtgaggcaaagcttgcagtgagccgagattgcgccactgcactccagcccaggcaacagagtgagactcagtctcaaaaaaaaaaaaaaaaagaaagaaagagagagaaagaaaaagaacacggagtaagcactcagagagtggcagcagggggctatttcacttagctgttcagggtgagcctcttggaggaggtgacatttaagcagaaatcagagataaatagctaccagggggaacagtgtcacaggcagagggaacagcaagtgtgaagtccctgaggcacgtgatctaaactgaattattccttctccccatcctctgaaagccccaggaaagagttggtcccaaacccagatagtgccaacgatgtagctagatcttagggaggccttcgcagggatcaggaaggcatcttttccacaaggaaaatagtggggctcagaactgtcaagctctctggtagtcactcccaggccagaacccagaacatcttggatagatcctggatgaatggacaatgcctctgacaggccctgctttcctgttctcctgctctctgggtcaaatccaaacttctgcccacagcttacaagttcctaagtggtctggcttccccggcctcatctccccgcgacctctccagccacaccagcgtccacactgcttctgaaactcaccaagcttgttcttaccccagggcctttgcaccttctgttcctcccaccttcaatgctcttcccccagacacccacaaggctccctctctcacctccttcagatgtcacctgaaacactacttccttagagacaccttccctgaccacactggctcaaatagcccccaccttgtaatctttttctgtttttttgctttgagacagtcttgttctgttgcctaggctggagtgcagtggcatgaccttggctcactggaacctctgcctcccaggttcaagcaattcgcctgcctcagcctcctgaatagctgggactacaggtgtgcaacaccacacctggctaattttttgcatttttagtagagacggggtttcaccatgttggccgggctggtctcaaactcctgacctcaagtgatccactcaccctggcctcccaaagtgctgggattacaggcgtgagcctccatgcccgactgctatcactctaatcttttttttttttttttttttttgagacagagtttcactcttgttgtccaggctggagtgcaatggcgatcgcagctcaccgcaacctctgcctcccaggttcaagcaattctcctgcctcagcctccctagtagctgggattacaggcgcctgccaccacacccagctaattttttgtatttttagtagagacagggtttcactatgttggccaggctggtctcgaactcctgacctcaggcgatccacttgcctcaacttcccaaaatgctgggattacaggcgtgagccacagcacccggctccagtctaatcttctatactttatctgttattcttcatgctacttgcattgtattatatgtatatttagttgccgacaccgtattacatggttattcggctcttttctgtctcctctgctaggtcaactccaggagagcagggatttgatgactcagttggtggctgtatccccagtgcataatcatatctgttcattgaatggattaaccaatgatttctaggaaggacccctgggcccatcagggacagggaagaagtctttggaaagtgatggagggagcgaagagtgggtagagcatcctctctgcagacccctcccttccctggggtgccaggcttggtgggccaacgccaagggggtgtatggggcgccgagactgtttcacaaccatgtagttcccgcggtggccgcctggaggcactgcagcccgcggcaggattccaccagccccgccctaacggattacctcatttggccacgcccccgttgtcctttagccccgcctccactgacctcgttagtcccgcccccaaagcaactccctcccagccctgggggctgtaggagtcaccctccaattgcaattctggcagcaaactctggcatcctagccaatcttggtgagaagccagaaaatctagtgcccccctagcagggagtggaggagaagccacagggggtggttctctgtctcctctgctaggtcaaggataattcaacttgattcctggctcattttttttccactggtttctcaagtgtgtgcctcttttggtctctcgtctcccaggtgtgtctcttggcttctctcaggctcacacatccattgagtacctattgtgtgtgtcctcatgcctggggctgggcacactccctatcccacccagcgcgtgggtgctgagatgcgtggggaaatggaggagcgagggaggggaccccacaatctctcctcgtggcctggaaatccttctatctggagtctaacctccattcctcccaacacccccctcggggtgagcacaagggtctgattcttttcttgataaggggaaggtgcccaaattgtttctcccctgcctatctacctaaaagcccacctagcaatgtcttcacggacgctgtccacacccatggagcggattatttaacaagagggtaatcgtgtgggctcaggagccggactgcctcggttcagtcccacctctgtcactctcgagcttgagcaagtgatttaacttttctgcgcctcagtttccccatccataaaatgaggtaacaataccatgctctagtagggaggaggcagagggggttaaatgccttagtctgtgctgtgtgattgaaacagcacctctcaaattagcacgtaatgaatgatcactgttatcataatgactattttattatttttgatcccagcttccctgtgaactcctacagatctgagaacttgggggtgctctcactcccaagatggaggaggagaggggctttccaatagcaaaagagagcgtggacgccccacattttgcaagcctccctgagcctgcccaagagaaaggtgccatggggagggagacccgcttctgtaagggtatgaatggcgtgtgcggttgtgagcaaggcaccaagatacacacacacacgtgcatggatggacacgtttgcacacacagcgcttgcacacacacacacccttttagagtgatttacccaaaggtacagaatagcacacgctcactccaaggctctcacacggccacacacctggccacacacgtattgtacaacacccagtcatctggagccagtaatgaggacacggtcacacacagactctgtctcacgtactgatcacaccccaactcgggcactagttggacaagccccccaaccgccacacacacaaactccccccggtcacacccaaccacgacacaaagacacacacgtttaccctgcacccccacagcatttcacacgcgtccccgtcagtcactctcacgtgagtcccgtcccctgccccacactgggggctgcaggcgaggagtggagggcttcagaaactgggcatctcggccccgaagaggaagtcaagggtaagcaaccgcccccctccaatgccccctgaagtttccctcccaaccccattcagctccagcgagatggcggggtgggggctcggggccatggaggggttgagaaccccaaagacgccaccccccaaaccagcccagcttgaggctggatttgaagcccccctcgtcctctcccaagccagagagtgcacgtcccggcccctcccccgctgcgacccccgcccctcgccgccctgcagctgggggggcttgtggagcctcccaaccccgtttctccgggaaccctccgcgcccccctcctctcccggagccacccgcgcccgcacctgcccgccgggcccctacctgtccggccaggcctgagcacagcagcagcagcagcggcggcgggaccgtgagcggccacatgacgcgcccctagcccggcgtcccgacccccgcccgccctagcggcgcctcggcgcggggaccgccaccaggcgcgaccccgcccgcccggccggggcgaccctgcgccgccgcctcccccgcctcgccggcggccgggattccgccccacccccgccccctcgctcgctccgagtctttgttgcgggctccgccccccgccccgcccccagctcctcttcgggagcagctcgagcagggtcgggtgggggggtgggggcggggaagtgggggagccagcgccggcgaggggacctgaggacaggacttggcagcgccccccaacccccaggccattccgggagcgggtcgcggaggtgggggaggggtgcccgtcacgtgtttgtaaatttcaccctccgggggcatttcccacgttgcaggtgggacggggacgaatggttgggggagaggaataggaggaaggcctggtagcagagaggggaaatgatgaacgccccctccctaaaaactcaagagtcaacagggaaactgaggcagaatctgaaattggaagttggaggaggggtcaatgccaggacaagaggggtgaggcatagatggagacggggaataagaggaaaaaattgaggttggggggacaggagaccgagaatcaggcaagaggccaatggaaatggccacgtgggtgggcttggcctcaaaaaggggcgtctcgttttcactctccccgggcgccccatttccccaccagtcctcccgctggaagcctccccgcctccgccacacctggaagagtttctcttcgctccctgtttcaatagcccaagatgaaagaccacatcccccgagagaatcaaaatattaacaccgcctccacgcgaagccatttgcatatgaagggcgtccttgtctagcctcactttcgggaggctttccagcctttctctgcctctcactcctccaaaagtctccctaggccgggcgcggtggctcacgcctgtaattccagcaatttgggaggctgaggagggtggatcatctgaggtcaggagttcaagaccagcctggccaacatggcaaaaccccacctctactaaaacatacaaaaattagccgggcgtggtggtgcatgcctggaatcccagctactcgggaggctgagacaggagaatcgcttgaacccgggaggcagaggttgcagtgagcagagatcgtgccattgcactccagcctgggcaacaggagcaaaccttgtctcaaaaaaaaaaaaaaaaaaaaagtgtccctagtcgtctttcctccccacagcccctctagggattcggatatatgtaggcagaggtggaggaggggggcgggcaaataagtcagattggaaagaaatcgggcataaaatatgcgaggccaggaagcctggcatttttgtgaccctgatactgttgggctaggaggggtctccccagacgctggtggggcctcgaccccagctggtgtccaggctcttaacaccatcgcaagaatgaattcaaggaggaatcagaaaatcatgaaaagttcggagatttttttgttaagggaaaagtccacacttgagaaaagggagtgggcgtacttaagagagagagatgggcaaggtggtttgggactgctacctttatgtgtctctttttttttttttttttttttttttttgagacaaagtctcgctctgtcacccaggctggagtgcagtggtgtgatctcggctcactgcaacctctgcctcccaggttcaagcaattctcctgcctcagcctcctgagtagctgggattacaggtgtgcgccatcacagccggctaattttttgtgtttttagtagagacagggtttcaccatattggccagcctggtctcaaactcctgacctcgtgatccacccgccttggcctcccaaagtgctgagattacaggcgtgagccaccacaacaggccactgtgtatctctttaaccaagggatggaatattcatgaaaactggaaaaaggtggactgtggtgccacccacttttacaccaaatttgggtgtccctggaattgtcaagggcgctggtgggtgggtaattttagtattttaatgagtacataatgagatcctaggtgaaacctaggtagaatgtaacgccatgttgggtccagtaggtcttagccagcttggtccacaccctggttttcaggatcttatcagcccatagcctctagtcatgtgaaacggctgcctgtgaccaccctggatcattcctgtctcaaccctactggggataaaacatgtcgatgatggttttgtcaggtcaatgagaaagagcttggtgacccacagatctgggttcaaccctggtgctgccacttcttggccatgtgaccttagggaaaaagctttccccctcttagaagacctgttttttgcagttattgggagacatctgtgactctaagcaaagagagcacctagctagcactcactccccagcacgccttgcaataaccaaccatgcactgggttgaggacactcatcatgggatgtggacacaaaatagagtctgagcctgcgaagacatcctgtttattcttctatctcttttttttttttttttttttgagatggagtctcacactgtcacacccaggctggagtgcagtggcttgatctcggcttacaacctctgccttccgggttcaaggaattctcccgcctcggccttccaagtagctgggattgcaggtgcctgccaccaggcctgtctaatttttcatatttttagtagagatggggtttcaccatattggccaggctggtcatgaactcttgacctcaggtgatccacctgcctcagcctcccaaagtgctgggattacaggcatgagccaccgcacccatcctattcttctatctccttttcccaaatgggagacagtcctttgtgggcccttcaggccaagcctgcagttggcattgcataaaaggaggacattggttggtaggacccacaagctcttgaccaagagtgggtctcacggtcaagagtcagcactcttgactcatgaatgctgcatttcaggaccatgaacagtgtcctccttgggctctggtcactaagacgatcacagttacaactaagctacagcctgtgttatatggttggaatttggtcgatatgcacttagatctattccccactttccccctgctcccctctgtatcagggcaatggctcctgcaaattatctttctcaggttctctacacactacatttcccaggcttctttgcatctggttaggctcagccaatgggaggtctacaggcagattggagggtgccaagaaaggagaagccagagaatttccccccctccactttgagtgtctctagccatggctgctgtgcctcctctgtggtctcagtcccattaggtattccccaccatggtggggggtgggggcaggtgactggccaggtaactgcagctcctggattcaggtaactaccacctccctttgttgtttcagtccttgcaaagatgatagctagcaactagagttgattcacctgctccagtttgcgcttaaaaccaacctaatagggccaggtgcggtggctcatacctgtaatcccagcactttgggaggctgaagtgggtggatcacctgaggtcaggtgtttgagaccagcctgcccaacaaggcaaaatgctgtctctactaaaaatacaaaaaattagccaggcatggtagcaggtgtctgtaatgccagctactgaggaggctgaggcagaagaatcgcttgaacccaggaggtagagattgcagtgagctgagatcatgccattgcactccagcctgggcaacaatagtgaaactctgtctcaaaaaagaaaaaaacaaaaacaaaacctacctatcggctgagtgccatggctaacacttctaatcccaacactttgggaggctgaggcaggtggattgtttgagccaaggagttcaagaccagcctggccaacatctctgtagagatgctgcatctctaccaaaaatacaaaaatgagccaggcatggtggtgcacacctgtagtctcagctactcaggaggctgaggtgggacgatcatctgagcctgagaaggtcgagactgcagtgagctatgattactccactgcactccagcctgggcaacagagtgagaccctgtctcaaaaaaccccacaaaagcaaacaaacaaacaaacctacctacctaatacctcagtgtgtggctaattaaagtccccatattaaattctttctattgaatttgctgggatgggctgtttttctgactggaccttagtcaatgcattcgatgccgttggtcgttgactggtatggttagtggccctctgggtgtcctgatggcattgtggtttgtgtcctgttgaaccgggatctgtgctgccgtcaacatcctggttctgccagggtcagcattgtggtcagaattgtggtcactcctggtcattcttggttgtgttgtggtcagtgtggtgattagtactacagtcagtttcctggttatgctgtgctctgtcctagtgctatggtccttgtcctgagcttgctgtggataatgacctggccaagctatggtcaaaattatgattgagtcatactaaggtcaaagtcacactcagcatcctagttgcactgatatcagcttcaaggtcagcactgtggttaatgttaagaagagtgcactgtctatggtgcagtggtcagaattgtgggccatcattgaagagacatcaggatccgcttctcaaggatctattgtggcaaaatggatgaactggggactcagggtctggcactgggcacaggtcattctccatgacaggaagcagggaggcagggcgttggatcttgccatctggccattgggtttttctaattggcacttggacagccaattagacaggaacttggacagccatgggttcctgtcaccctctcacagcccacatctgtttcctcacaccctgcaccacccacttcatagagaaaatgatcatgaagtgaatgcctgccaacacatacctttgctcttgctaatccctgaatatattatttagaggtcctttggtagaatttagcagaaactcaacttgaactggattaagaaaaaaaatctattggctcatataacttaaacaaaaatgagggtagtggaattcagtcatggctggatccagggtttctgttatatcatcaggattctgtctctctccattcctcatctctcatttctcatctctcatttctcattccatgctgtcttttgggaaggattcacttttagccaagagatgacaaagatggtttccagaagcttctctcttccaagctcagcagcatcagcaaaaagagagcttgcaaaataatgtctcattatgcatcccaagttgtgtgcccatcctgaaccaattatgtattcagaggaattcattatttggcttggctaggtctggctcatagatcacccccacggagccagagagtgcagttagccttattcaacctacattggataggaagtgggaggtagagaaggatatagaatgttgaccactaaaagagagaaaggacactgtacaagcaaaaccaaaatatatggttttgggcagggggtggttcttggcatcatttcaaccccctagtatgcattccttattatagagcctgcaaagcgaaaatacttccagactcccttgcagctaaacttctgtaggccaattaggtttcatccattagaagcatgagaagtgggtggtggaagaaggtggaattaatcttcctgttatgctggtagaggcagctgctaagcacaattgggagacactggattttcctgcaggaatgttcctgtttccaattgtgagaacaacccgtttttgttgagagtccattgcagtaacaatgatgactgcctccgtatctctgaattgcaactttcctggtgttttcattgttttgttgttcctgttgctgttgttgttgttgttgtttttgagatagagtctcgctgtgtcacccaggctggagtgaagtgatgggatcttggctcactgcaacctccacctcccagactcaagcaatccttccacctcagtccatcccagtaaatgggactgcagttgcatgccaccacaccttgctaattttctgtattttctgtagagatggagtctctccatttgcctaggcttgtctcaaactcctgggctcaagggatccacccgcattggcctcccaaagtgctaggattacaggcgtgagtcaccacgcccagccatgctgttcctttttatggttcaataatattccattgtgtggatatcccatattttgttcattaattatggtgatgtagtcttaaagtcaaaaatccccactctaggggataattctccacctccctgctaataatagaggcagaagctcctgcttgggtgagttgggaggtgatggtttttgttttgtttttgtttttgttttgagatggagcctcgctctgttgcccaggctggagtgcagtggtacaatctcagctcactgcaacctccacctcctggattcaagcaattctcctgcttcagcctccagagtaactgggattacaggcacatgccatcacgcccagctagttttttgtatttttagtagagacagggtttcactatgttggccaggctggtcttgaactcctgacctcaagtgatgtgccttccttggcctcccaaagggataggattacaggggtgagccattgctcccagccgggaggtggtgttttgtagcaagtcattctatcggctttccctagatccctattctccagccttggttctgtaagcaccaagttccctggttttggttctcatttcctgcaactaaaccgtgattgatatgtgcttggaagattcattccctttatctgtctgaagagaacctcataattcacgaagccccaatactccaagctattcatgacctacctactcagtactccctcctggaccatgctggaaacatctctttaacaggaaccttcctgactcactgagctccagtgaagcacccaccactgggatacatcctctccatacattaattccttgagttcttacaacaaccctgtagggtaggcactgttatcccccatttaaaaatgcaggccaggtgcagcagctcatacctataatcccagcactttgggaggcagaggactgcagatcacttgagcccaggagtttgagaccagcctggcaacatggcaaaaccccatctctacaacaaatacaaaaagtagctaggcatggtggcttgcgcctgtagtactagctacttggaaggctgaggagggaagatcgtttgagcccaggaggtcgaggctgcagtgagctgcaattgcaccactgccctccagcctgggtgacagagcgagaccctgtctctaataaataaataaatgaaaactttgaggctcagagaggttaagtaatttgcccgaggtcacccagctataaagggcagacacaggattcagactcagttccatctgactcaaagccaacctattgaccgggtgcagtggctggcacctgtattcccagcactttaggagaccaaggtgggaggatcacttgagcccaggagttctaggctgcagtgacctgtgatggtgccactgtactccagcctgggtgacagagtaagaccttgtctcttttctttttttcaaaaaaagaaaaaaaaaaaggaagtagttggggtctcgcccaggtaattctttttttttttgggggggagatggagtcttgctcagtcgcccaggctggagtgcagtggcgcgatctcggttcactgcaagctctgcctcctgggttcacaccattctcctgcctcagcctcccgagtagctgggactaccggcacctgccaccacgcccagctaatttttttgtatttttagtagagacagggtttcaccatgttagccaggatggtctcgatctcctgacctcgtgatccacccaccttggcctcccaaagtgctgggattacaggcatgagccactatgcccaacctcacccaggtaattcttttaattaatgagagcccatctctactaaaaataaaaaattatctgagcatggtgccttgtgcctgtagtctcacctactctggaagctgaagcaggagaattgcttgagcctgagagattgaggcttcagtgagctgattgcaccactggactccagcctgggcaacagagtgagaccttgtctcaaaaaagaaagaaagaaaggggccaggcactgtggttcacaactgcaatcccagcactttgggaggccacggtgggtggattacttgaggtcagaagtttgagactagccgggccaacatgatgaaaccccgtctctactaaaaatacaaaaattagcctggcatggtggcgcatgcctgtaatcccagctactcgggaggctgaggcaggagaattgcttgaaaccgagagatggaggttgcagtaagctgagatcactgcactccagcctgggtgacagaataagacgaaagagagaaagagagagggaaagaaagaaagagagagagagagagagagaaagaaagaaagaaagaaagaaagaaagaaagaaagaaagaaagaaagaaagaagaaagcaagaaggaaggaaggaaggaaagaaagcagcagaaaaagaggaaggaagggaggaaggaaagaaggaaggaaggaagggagggagggagggaaggaaggaaggaaggaaggaaggaaagagagagagagaaagaaaatagacacacacacaactccacaaaacccacaattcagacacacagctcacacacaggtctccagcatagacatatttatacatccgtttactcaaacactcacaatacaatcacataaaacaggcagacagttcacatgccaacacactcttgcacagacacgcaaacagaagcatggaatttgtacagagcacgctcacagtgtctgatccataactcagacacggagtcacgcccacaaaggcacagtagaggcagagttcacacacaaacagacccgcggggacccacgacacagccctctgacacgaggacgccaggccagggcagcgtgggaatgaggctgcaaggagggagtgaggtggagaggatgactcaggaggcctctctgggggaggaggagggaagggggaggagggcaggcatccagcgcatgtggttcctattaggggcctgggaattgaggcatgagctggcgggacaaggagacccaggaacgcttcccagccttaccaaagcaggaaggagcagggccctgatctaaggccatgcggccggaacttggctcagaaccacagccgttctaaggcagagtggtctgccccaagccaggcccagcagggggctcatttcaacccctgcgatagtcctggagaagatttctttttattttttcttctttctttctttcttttttttttttttctgagacagagtttcgctcttgttgcccaggctgcagtgcaatggcgcgatctcagctcactggaacctccacctcccaggttcaagcgattctcctgcctcagctacccgagtagctgggattacaggctcctgccacatgcctggctaatttttgtatttttagtagagacagggtttcaccatgttggtcaggctggtcttcaactcctgacctcaggtgatacgcctgcctcggcctcccaaagtgctggaattacaggcatgagccaccaagctgggcccctttctttctttttttgagacagggcctcactctgtcacccaggctggagtgtggtagcacaatcacagctcattgtagcctcgacctccccaggctcaggtgatcctcctacctcagcctcccaggtagctggtactacaggtgcacaccgccaccatgcccagctaattgtattttttatagagatggggtttcaccatgttgcccaggctgttctggtcttgaactcctgggctcaagtgatcaactcgccttggtctcccaaagggttgggattacaggcatgagccacccggcctggacttttttcttttttttttttttttgagacagggtcttgctctgtcgcccaggctggagtacagtggtgcaatcatggctcactgcagcctcgacatcctggcctcaggcaatcctccttggagggtttcgtaggggaggaaagtgacattcagaaaggtgaagcaacttgcctgaggtcacacagcaaggaggtagaggagctaggattcaagcccttgtctctgtgcagcctcctctccccaccttgtagtagaggccaggacccctccatttaagctacaagcagagatcaagaactgacacctggaccaggctgcactggatttgtggctctgaaacagccagctctggccaggcgcggtggctcttgcaagtaatcccagcactttgggaggccaaggcagatggatcacttgaggccaggaatttgagaccagcctgaccaatatgatgaaaccctgtctttactaaaaataccaaaaattagtcaagcgtggtggtgtgtgcctgtagtcccagctactggggagactgaggcaggagaatcacttgaatccaggaggcggaggttggtgggccgagatcacgctactgcactccagcctggggagcagagtgaggctctgtctcaaaaaaaaaaagaaaaaaaaagggaaagaaaaagccagccccatcctcaaataacttagagtcaagagcgtgctgtgtgcacatgtgggcaaggttctctgggcgtgtatgggaggccctgacgtagcctgggttgtttgccatgaggggcggatgctggagatgaaacctgaaggatgcagaggagctagcagggctcggtgggcagcaagaagaccctggggctgcaaggttcagagagttaggtcacctggtgagggacagtgacaggggaagcccaagattctaggtcagaggacttgggctttatcttagggttaacagggaagcctcagaagaatggtgagaggaaagggacagggtgaagtctgagtgaccagcacgaagtccacacccaggacagctgaacatgtgcctcccccataacccagaatttctattcttagcaatctatacaccctagagacacttatctatgtgcacaaaagacacacgctgtggccgggtgcagtggctcatgcctgcaatcccagcactttgggaggccaaggcgggaggatgggttgagcccaagagttccagaccagcctgggcaacagggcaagacctcctctctataaaataataataataataataataataataataataataataataaaactacctggtcatggtgatttgcgccttctatttgggaggatgaggtgggagaatcacttgagcccaggagttgaaggctgcagtgagctatcattgcaccgctgcaccccagcctgggcaagagcaagaccctgtctcttaaaaaaaaaaaagacacatggctgggccgggtgcagtggcccatgcctgtaaccccagcactttgggaggccaaggtgggtggatcacaaggtcaggagtttgagaccagcctggccaacatggtgaaacccccgtctctactaaaaatacaaaaattagcagggcgtggtggtgcgcacctgtagtcctagctactcaggaggctgaggcaggagaatcgcttgaacccgcaaggcggaggttgcagtgagccgagatcaggccactgcattccagcctgggtgacagacggacaatctgtcccaaaaaaaaaaaaaaaagacacatggccaggcacagtggctcttgcctgtaatcccagcactttgggaggccaaggtgggtggatcacgaggtcaggagatcgataccatcctggctaacacggtgaaaccccatctctactaaaaatagaaaaaattagctgggcatggtggcgggcgcctgtagtcccagctactcaggaggctgaggcaagagaatggcgtgaacccgggaggcggagcttgcagtcagccgagatagcgccactgcactccagcctgggtgaaagagcgagactctgtctaaaaaaaaaaaaaaaaaaaaaaagacgcatgccagaatgtttaaacagaaacaaaatgggaaaaacctaagagttcatgcatagaatgagtaactatgcagaggtaaggtcacacgttaccactgcactttagcatgggcaagagaacaataccctgtctcagagagagagggagagagagagagagagagagagagagagagagagagatacttgtatctacaaggacaggcaaaacctccagttgagctaacaaagcaagttgcaaaagaacatgttcaaccttgaaccagttagagatcatttaaaaatctgccaaatcatgtgtgtcatccatggatacagcagtccatatgcagtacatttggaaaagcattctgggaacagccattcccacactcagaggggtgggataatggggaaagagtgtttcatggggacagtagttcagtctgggaagatgagaacattctggagatgagtggtgatgatggttgcacagtaatgcgatcgtactcaagccactggactatacacttgaaactagttacaatggaaaacgttatgttatatacatatatatatatatttttatttatttatttatttatttatttgagacgttgtctgcctttgtcaccaggctggagtgtagtggcaccatctcagctcactacaacctccgcctcccgggttcaagcaattcttctgcctcagcctcctgagtagctgggactacaggtgcacaccaccacacccacctaatttttgtttttttagtagagacggggtttcaccgtgttggccaggatggtctcaatctcttgacctcatgatctgtccacctcggcctcccaacgtgttgggcatgagccaccgcgcccagccctatgttatgcatattttacatacacatttggatacagttggtgagggaaagaaagagatgcagtcggataaatgtatacaaggggcatcaattatgtgcaaagcgttatttctcaggtgggtgtgtgagtaggtgagagttcatgataagagttctctctattattttctatttatgtattaattaattaacttttttttgagacggagtctcactctgtcacccagcgtggagtgcattggcatgatctcagctcactgcagcctccgcctcctgggttcaagcgattctcctgcctcagcctcctgagtagctgggattgcaggtgcacaccaccatgcccaactaatttttgtatttttagtagagacggggtttcaccatgttggccaagctggtctcgaactcctgacctcagatgatctggcctccttgacttcccaaagtgctgggattacaggcgtgagccaccatgcctggctggttattataaatagtgctgctatgcacatgggtgtacaaatatgtctttgagctttcgctctcaattcttttgctatatacccagaagtgggattgctctgcctggtacatttcttgttaaaattttgttttcattgaggcatatattatacacaataaaattcactaatctctatttttttttttttttttttagacagggtctcattctatcatccaggctggaacgcagtggcccagtcatggctcactgcagccttgacctcctgggctcaagtgatactgttgcctcagccgccctagaagctgggactacaggcacatgccattacacctggctaaagttttaagtttttgtagaaacagggtctcactatgttgccagggctaatcttgaactcctggcctcaagcgatcctcccaccttggcctcccaaagcgctaggattacaaacttgagccaccacccctggactcccctagcttttcttcatagcaccacttgatattatatatatacatatatatacacacatatatgtgtgtgtatatatacatatatgtgtgtgtgtgtgtgtgtatatgtgtgtgtgtgtatgtgtgtgtgtgtatatatatatgtatatatttgcttactgcctgtcaaccatcctaaagtgttaactccagcagggcaaggatctttgtttgtttcatggctgtctccccagagcctacgccattgcactctagtgcctggagcatagtaggtgctgaacaaatatttgttgaatgttatatgtgctgggatggggcctctgatatgtctacaagccagttttttggggtttttgttgtcgttgttgtcgtttttgagatggagtctcgctctgttgcccaggctggagtgtagtggtgcgacctcggctcactgcaacctccacctcccgggttcaaacgattctcctgcctcagcctcccgagtagctgggattacaggtgtgcaccaccatgcctcactaatttttgtatttttagtagagatggggtttcagcatgtccaccaggctggtcttgaactcctgacctcaggtgatctgccggcctcagcctcccaaagtgctgggattacaggcatgaaccaccatgactggcctacaagccagtttaaccaggctcttgtatgtagcttcatgtgtcaatggcatgtcttcatgtgaggctgcagttttccaggtctaacatgtgccagccaggtctcatgatgcagtagttttgtgtatgacaatgacagtctctctctccaggtgtggctctgtctctgcaaatggatttctgaacaccaatgtgtgtgtgtgaagggagctctgggtgtgtgttgtaaaccaataagtaggccgggtgcggtggctcacgcctgtaatcccagcactttgcaaggccgaggagggcggatccgaggtcaggagatagagaccgtcctggctaacacagtgaaactctgtctctactaaaaatacaaaaaattggcagggcgcggtggcgagcacctgtagtcccagctactcaggaggctgaggcaggaaaatggcgtgaacacgggaggcggagcttgcagtgagtcgagatggcaccgctgcactccagcctgggcgacagagcgagactctgtctcaataaataaataaataaataaataaataaataaataaaccaataagtaacagaggcagatctcaatcaatttagaggttgattttgccaaggttaaggacactcctgggaaaaagaaacacaagttacagtaggatctgccgcctgtgctttgtccaaagagagtttttaggacttcactatttaaaggggactgggtgtagtggttcatgcctgcaatcccagtgctctaggaggccgaagtgggaggatcacttgagcccgggagttcgaggctgcagtgagctgtgatggcaccattgcacttcagcctgggcaacacaacgagaccctatctccaaaaagaaattcttttaagaaaaaaaattagagtgggcacaatggctcatacctgtaatcccacactttgggaggtcaaggcgggcagatcacttgaggccaggagttcaagaccagcctggccaacatggtgaaaccccatctctactaaaaatacaaaaaattagccgaatgtggcagcatgtgcctgtaatcccagctacttgggaggctcaggtatgagaatcgcttgaactcgagaggcagaggttgcaatgaaccgagatcacatcattgcactccagcctgggtgacaaagcaagactccatctcaaagaagagaaaaaaattaaaacaaatttaaggggaaaaagcaaaaaggaggggaaggaggaagggaaaaataggggagagagtaggcaatgaggcaagtggtttcattcatgtgaggctttgattaccgcttagtgaatctgcattttacatgtgaaaagagaggggtagattatgcaatcggctccagctcagtaaatctacattttacgtaagacagagtaagcaagtgaaattacagctatctccttcggaacaaaaggaaagcagttttcgcctgactcagttcccaagcttcacttttcccttttgccacagttgagtttggagccccaagttgcaattttcctttcacagctgggagtgtgtgactgtgtgtgtgccctgctattggtgccagtgtgtctgaacctggctgaggatgtgggtgtgtgtacgggagtttggaacatgacctgcagccgtggcaggggtgacaagagaaaagcctgactttgagggtccttggttctgatatataattgtgtgtgagtgtccccatcaaagttgtggccgggcacggtggctcatgcctgtaatcccagcactttgagaggtcaaggcaggcggatcgcctgaggtcaggagtttgagactagcctcgccaacattgccaaaccccgtctctaataaaaatttaaaaaaaaaaaaaaaaaagctaggaatggtggcacacacctgtagtcccagctactcaggaggctgagtcagaggaattgcttgaacctgggaggcggaggttgcagtgagccaagattgtgccactgccactgcattccagcctgggcaacagggcaagacttcatctcaaacaaaacaaaacgaagttatgggtatgcgtgtgtaaaattccctgctaggcccggcaccctggctaacacctgtcatcccagcactttgagaggctgaggcaggagaaccgcttgagctcaggagttccagaccagcctgggcaacatagtgagcccttgtctctacaaaagatttaaaaattaggtgggtgtggtggcacgagcctgtggtcccagctactcaggaggctgagatgtgaggatctcttgagactgggatgttgaggctctactccagcccgggcaacagaacgagaccatctcaaaaacaacaacaacaacaaaagaaatagccgggcatggtggtgcgcacctgtagtcccagctatgagggaggctgaggcaggaggattgcttaaagccaggaatttgaggctgcagtgagctatgatcaagccactgaacttcagcttgggtgacagcacaggaccctgtctctaaaaaaataaattaaaaaccattagtgaggagaggtgggatgcacctgtggtcccagctactctggaggctgaggcaggaggatcacttgagcaggggaggtggaagctacagtgagccatgatcacaccactgcactccagcctggtgacagagcaagaccccaactcctaaacaaataaactcccctaccatatccgccccgcgcctgaccacagccatctctgtataaagccacaggcggcccccactctggccaccccactccacccctggctggaacactgggtgtcagtaattgctcagggagcactagcagtgtgattaattatggctgctaaatatgtaaatcagctgggggttttccgggcagccgcctgggtgctggcactaatgttgaataaacacaaggagcttagcaaggcccagaattcccttctcacacctttgtcaattaacgtttcatttatggggttgggtttctcattcattaacgagctttgggctcattaaagagtcctcattaaactctataaatcgtccctcctttccaaaacgcctgcactgggatgggaatggagttgcaaaaccgagacaggccgacctgcattcaaacgcctggctgtgtactgtgggcagacgcctcccctctctgaacctgtttccttcctgtaaaatgcaagcaaacagacatgggggcatgggggcaagcgccctgtggctcatgcctataatctcaacactttgggaggccaaggcgggaggatcgcctgaggacaggagtttgagaccagcctgggcaacatagcaagaccctttctctacaaaaaaaatttgaaaattagctgagcatggtgaagcgcacctgtagtcccagctactcaggaggtggaggcaagagggttggttgagcccaggtgttggaggctgcagtgagctatgatcgtgtgactgcactccagcctgggcaacagagcaagatcctgtttcaaaaaaataaaaggctggggtcaggagttcaagaccagcctggtcaacatagtgaaagccctgtctctactaaagatgcaaaaattagctgggtgtgatggcacgtgcctgtagtcccagttgctcaggaggctgagacaggagaattgcttgaacccaggaggcaaaggctgcagtgagctgagatcatgctactgtactccagcctggtcaacagagcaagactctgtctcaaaaaataaagaaatacaataaataaaataaaataaaagaaataggccgagcacggtggctcacacctgtaatcccagcactttgggaggctgaggcaagtggatcacctgaggtcaggagttcgagacctgcctgaccaacatggtgaaacccccgtctctactaaaaatacaaaaattagttgggcatggtggcacacgcccataatcccaggtacacgggagcctgaggcaggagaatcgcttgatctcaggaggcagaatttgcagtgagctgagctcacgccattgctctcaagcctgggtgacagagcgaaactccttctcaaaaataaataaataaataaataataataattaaaataaaataaatataaataaaaagaaagggagatattaaagtggactgtgataattaagaaagagaatacatgtaaagtgctgagcccaggggtgtaattttgaaaaacggcaacagccaaaattcccttaagagagagaatggctttttgtttagcaaaatgtttgtgttttttgtttttcgtttttaagagatgggatcttggtatgttgcccatgttgacttgaagtcctgggctcaaactcactccagatctcccaccttaggctcctaaatagcttgagctacaggtgcatgtcaccatgcccagctctgtttagcaaaatctgttgatgatcttcatcactttcttctttttttttttttttttgacggagtctcgctctgtcgcccaggctgcagtgcagtggtgcaatctcagctcactgcaagctccacctcccgggttcacgccattctcctgtctcagcctcccgagtagctgggactacaggcgcccgccaccacgccctgctaatttttcatatttttagtagagacggggtttcactgggttagccaggatggtctcgatctcctgacctcatgatccacccaccttggcctcccaaagtgctgggattacaggcgtgagccaccgcgtctggccgatggtcttcatcactttctagttctagactttggataaattattccacctctctctgttcctcagtttctttatctgcaccacagagataataatagaacatccctcaaaggttgttatgtgggataattaaattaatcgaggtaaaacatttgatgaacagtgtctggcatatgagtaataaatggcaactatgattaagattaatagtgttagttgaggctgggcatggtgtctcacgcctgtaatcccagcactttgggaagctgaggctgaatgatcccttgagcccaggagcttgagaccagcctgggcaacacagtgagaccttgtcttttttttttttttttgagacagagtctcgctctgtcacccaggttggagtgcagtggcacaatctcggctcactgcaacctccacctccctggttcaagcaattctcatagctcagcctccacagcagctgggactacaggcacatgccaccatgcccagctaatttttgtatttttagtagagacggggtttcaccatattggccaggctggtctcaaactcctgacctcatgatccacccgccttggcctcccaaagtgctgggattacaggtgtgagccactgtgcccagccgagaccctgtctctctgtttttttttttttaattatactttaagttctagggtacatgtgcacaacgtgcaggtttgttacataggtatacatgtgccatgttggtgtgctgcacccattaactcatttacattaggtatatctcctaatgctatccctcccccctccccccagaccctgtctctttaaaaaagtttaaaaattggctgggcgcggtggctcatgcctgtaatcccagcatttaggaggccaagatgtgtggatcatgaagtcaggagatcaagaccatcctggacaacatggtgaaaccccgtctctagtaaaatacaaaaaaaaaaattagccaggcatgatggcgcacacctatagtcccagctactagggaggctgaggcagggtagttgcttggaaccaggaggcagaggttgcaacgagccgagatcacgccactgcactccagcctggcgacagagcaagactctgtcaaaaaaaaaaaaaaagtttaaaaattagctgggcgtggtggcacatgaatatagtcccagctacttgagaggctgaggtgggaggatcacttgagtccaggagttggagactgcagtgagctatgattgcaccactgcactccagcctgggcaacagcaagaaaaaaaaatgcttctaaaaaaacatgaatgaacgaatcatcaacctctgggcaccaacagtcttcatggagtcaggactcttagcaacgttgattcaatgaatgaggacaagtattcaggtggccttaaggggctggtggcaggagtagtagggtgagagccttgggtttgagggagaaaactcaccccaacctgaagtttctacccacccaatcccatctgacccaactcaactcacaccatttctccatcactcctaactaaactcaatccaacagtgcccatcaacgatgaatgaattagctgaaggtgggagatgactgaatattacttggcaataaaaaggaatgaagtactgatgcatgctgcaaataaacctggaaaccagccaggcactgtggttaatgtctgtaatctcagcactttgggagatcgaggtgggtgaatcacttgaggccaggggttcgagaccagcctggccgacatggtgaaactccgtttctactaaaaatacaaaaattagccagggatggtggtgcgtgcctgtagtcccagctactcgcgaggctgagaaaggagaattgcttgaaccctggagggggaggttgcagtgagccgagattgtgctactgcactccagcctgggtgacagagcgagactctgcccacaaaacaaaaaactcctggaaaccgttttgctgaaaatgccagatacaaagggccatatatcattatatcatttatttgtatttattccttttttttttttttttttagagacaaggtctcactctgtttcccaggctggagtgcagtggtgagatcacagctcactgcagcctccaactcctggcctccagtgattctcccgcctcagcctcttgggtagctgggactacagatatgcaccactgtacctggctaatgtttttattttcatttttgtagagatggggtcttgctatgttgcctaggctggtctggaactcctggcctcaagcgatcctcctgccttggcctcccaaaatgctggggttgcaggagtgagccacctcacctagcgtgattccatttatatgaaatggatatttctgtccagaataggcaaatccttagagacagaaagcagattcgtggttgcctacagctgggaggttggaaagacatgagtgaccactaatgggtataggatttcttttaattacacagcttaaatgggtgaattatatggtaatgaatggtaatgaattatatggtaatgggtaaatgaattctatctcaataaatcagttaaaaatatacctcaaaccaacatcttactcctaattcaaatcatcccaaaccaaatttttttttttttttgagacaagttcttgctgtggtgtcacccaggctggagcacagtggtgcaatctcagcttactgcaacctccgcctcccaggctcaagtcattctcccacctcagcctcctgagtagctgaaaccacaggcatgctcctccatgcctagctaattaaaaaaaatttttttgtaaagaggccaaacttctggtttaagctgacttgggcctcccagcccaagctgacaattttcaacttttcctctaggagcctgggtgaataaataggcctataatctccagtgagtctcattataattgcattcccaaaagacatacctaattaatacaggtggtgacaggtacctcagatgagacaagagccagatcccaagacagatatgggccacatcagatgaaagagatcaagagctgggtgaggtggctcgtacctgtaatctcagcagctcaggaggctgaggtgggaggattgcttgaggctagtagtttgagacaagcctgggcaacaaagaaagacaccatctgtacacaaacacacacacacacacacacacacaaaacaacccagctgggtgtgatggtgcatgcctgtggtcccaggtactcaggaggctgaagaaggaggatcactcgagtcccagagttggaggctgcagtgagccatgatcatgcccttgcactccagactgggcgacagagtgagacccagtctctaaaaacgagcaaacaagggctgagcgtggtggctcacatctgtaatcccagcactttgggagatcaaggcgggcggatcacctgaagtcaggagttcaagaccagcctggccaacaaggtgaaatcccatctctactaaaattataaaaattagccgggtgtggtggtgcatatctgcaaccccagcttctagggaggctgaggcaggagaattgtttgaacccgggaggcggaggttgcagtgagccaagcttgcaccactgcactccagcctgggcgacagagcaagactgcgtctcaaggataaataaataaaacaaacaaacaaacaaaaaaatttaaaaaagaaatacacagagacagaaacacagttcatcagtttattctcagatttgagatgcaaattatgccctatggcctggcggtggggggccaggcttgggctggaatctctcatcatatcccagccttccctaaggaggaagcagatgaaatctacaacaggggggactttcccttttaatacagacccaggtataaatagggcagcaccattaggatcctgattcacccccccaacatcttggtccccaaaccacctggcatggcaaggtgagcctggggaggtggggggcagggggaggggatttgcagagctgggctgaggcaggaaaagaaacacaacccagtcaagggaagtccctcttccctctgtagtccgacctcagtcctttcaccgtggaagtagaaaggatcaaagggggtgggggtaggggtcccagcctgggatcaggagacatccagtgcttaactctggggaggggtagcaccaaaaggtgtgaagggcagcgacggaggagtgaggaggcaggcattgggggtgggggggcttttgttcatcagctctgagttagaagctcattgcatgggggttcaaggggtggggaggtgaggcttgggtggggagggaggggagaaagagccagactgcagtatgccacctggaatggggtgagaggaggctggacccttgggccagggaaccccagcccccagcaccctggaaaggagaaggaatgactgtccgtgatgagcgaagtcacatcccattggctccatagtcacaggtaacgaaaaatacggtggcttcaaagcctcagcaccaaatgcaccccattctggggctccctcatggtccctcccaccccggacactctcagctgctgaagcagacggggcccagttcaaacccaaacttttggttcgtctggccaaagtcagtggccgccacatcccacaggggcagaaatcccgctcgagaagagctgaattcgaaaagggtcttcgtctgtcctttccggagctgtccccagagaagacagagacggtgagttaccgggaaggtggccgacatcttgcctcccctctctagctggccactgccccaccctcttacccggcagccatcctgggggacgctgacagtggctgctgtcgtctggttgaaagacagctcctctccattggtgccaaggaagcgggcggagtggctgtagtcacccgtggcttcgtccagccaggcagctgcattctggcaggagtaggtgaagttctggcgagctgtggcactcagcagtttcaggaagttcagctgcacgacattcactggggacccgtcggcgtccacgtaggagaactggtgagaggagggcaaggcagaggatgaggggctccatgagcctctttctgcagaagccaccccctggaatctccatccactggcagacaagccaccccccccatgtcaccatctctgaggaggtcccaccagccacctagagatccctggcagaatcccaagagtcacctgaacatccactctgtccacctctccatccagtaggcctccatgcccactccatctgacctcccaaattctgattgcttcatccaccaatccagggttttaacacactcatccccacccagaagacacaactctgcctccactcttgtgagtcgctggatctacagagctcactgtccctgataccagatttctgccctgtccaatatggcagccacatgtctaatagccacgtggcttttgagcacttgaaatgtggctgatttgaaggagggatttttttttactttatttaattttttttccttttttggggggtaagggttgggatcttgctctttcgcgcaagttggggtgcactggcacaatcctggctcattccagcctccatctcctgagctcaagtcatcctcccatctcagcctcccaagtagctgggactataggtgcacaccaccatgcctggctgggactttttttttttttaacttcatttaatttttttttttttttttgagacggagtcttgctctgtcgcccaggctggagtgcagtggcatggtctcagctcactgcaagctccgcctcccgggttcacgcctttctcctgcctcagcctcccaagtaactgggactacgggcgcctgccaccacgcccggctaattttttgtatttttagtagagacggggtttcaccatgttagccaggatggtctcgatctcctgacctcgtgatccgcccaccttggcctcccaaagtgctgggattacaggcgtgagccactgtgcctggccctgaattcttttacttaaaaaaattcacaactaatgactgagcttcaatccagttatcagaaagcttatgcttggaacaacttgagtctgaatctactttttgaactgttgttcaatggttttatgaaatctaaatatagagcaaatattcccaataaaatttagcattcaaattgtgatgtactataaatgtaaaatctccatcagattttgaagagctaatctgaaaaaaatacaaaatatcttaataatgctttttttttttttgagacggaatctcgctctgttgcccaggctggagtgcagtggcacggttttggctcactgcaacctcttcctccagggctcaagtgattttcctgcctcagcctcctgagtagctgggattacaggcacacatcaccatgtctggctaattttttgtatttttagcagagatggggttttacaatgttggccaggctggtcttgaactcctgacctcaggtgatccgcctaccttggcctcccaaagtgctggaattacaggccactgtacccagccatgtggctttttcttcttcaaattcaccagaccctgtcttgactgagcctttgcatatgcctttccctctccctggaacacttgtccttgtccttcctagcttgctaacacagtgcattctttaggcttcagatgagctgtgatctctactaggaagccttctggtctttccaacactgcctctaaatttccaccatgccctgtgcttcccctatcctggcaccatcattctgtatggcaattgactgcctgttacacatctgatgctgctgccaccccacctccagcttgcgatccctaggaaggtagaggaaagcctatcctcttcatctcacctctcagaacccacccctcaaacccccctgctggttcccatcaattttcatgtcactccccatctcggcctcggtgactcaccttcttccctcgacggaatgtgctataccagcctccaggcttttccttggaccaggaggccaatttcacctggaagagaaaagggagggtcactgtagctgacgcccttggtgccatctagatctcatctgcatttccctcctcacacagtaggctgttgtgactatgtcaggatgttctctggcttctgggatggacgagctctgccagtgcacaatgggggaaggaggttcatgcccctgaggcagccctcacccaatgactaatgggagttggtggataaataccccagctccctcacctccaagggggataactctcaggtgcctgtgctacacagtctcccagggctccccagtgggattgagctctgggtctccaatggcaccattttattttaattaattaattaattaatttttgagacaggatctcactctgtcacccaggctgaagtgcagtgacataatcatagttcactgcagcctcaaactcctgggctcaagcaatcctcccactgcagcctcccaagtagctagaactacaggcatgtacccccatgcccagcttttttaaatttttattttttgagacagagtcttgttctgtcacagggtcttggagtgcagtggtgtgatcactggctcactgcagcctcgacttccaaagttcaagcaatcctctgacctcagcctcctaagtagctgggataataggagtgtgccaccatgcctgttttttttgggggggggggcgggtggagggggtctttctatgttgcccaggctggtcttgaactcctgggctcaagcgatcctcccacctcagcctcagcctcccaaagtgctgggattacaggtatgagccactgtgcccagcctcagcctctccctttaggctaagcaggtgagtgaagaggaggtcctcagatgttagtaattgtttagggatcaagtcttgcactccgggcccagtgggaagtccaagcttgtctaaattcccatccactgggcatctgagctcccactaaaccaggagaaaataaaccagttaaaaataacaacatggggccaggcgcggtggctcaaacctgtaatctcagcactttgggaggccgagatgggtggatcactcgaggccatgagtttgagaccagcctggccaacatggtgaaaccccgtctctgctaaaaatacaatacaaaatgagccaggtgtggtgacaggcacctgtaatctcagctactcgggaggctaaggcaggagaattgcttgaactggggaggtggaagttgcagtgaaccaagatcacgccactgcactccagcctgggcaacagagtgagactatgtctcaaaagaacaaaacaatatggggctgggcacagtggctttctcccactgcttaatcccagtgctttaggttacagtgagctatgatgatgccactgcactccagcctgggtgatagagaaagaccctgtctataaaaattagaatagaccgggtgtggtggtttatgcctataatcacaataccttgggaggccaatgcaggaggatctcttgaggccaggagttcaagaccagcctgggcaacatagtgagaccctcatctctataagaaatttaaaaaattagccaggcatggtgatgcacacctgtgtgatgcacagctactcaagaggctgagacaggaggatcattgaacccaggaggttaaggctgcagtgagctgtgatcccaccactgtgctctagcctgggtgacagagtgagaccctgtctgaaaaacagacaaaaataacaataacaataaatattatttcacacttataccggccaggttcttgctaagtgctttacctgcagatagaggtattagcccagcactacatgtagtcagggtttagtaaatgttccctgcaggccaggtgcggtggctcatgcctgtaatcccagcactttgggaggccaaggtgggcagatcacctgaggtcaagaccagcctaaccaacgtagtgaaaccccatctctactaaaaaaaaaaaaaaaaaaaaaaaaaaaaaaaaaaaaaaaaaaaaatcagctgggcatggtggcgcatgcctgtaattacagctcctggggaggctgaggcaggagaaacacttgaacctgggaggcagaggttgcagtgagctgagatcacgccactgcattccaggctgggagacagagacagactctgtctcacacacacacaaaaacaaaacagttcactgatatttgtttttgcatcagtatctgaattgcacagccactctatgaagtagatactttctttttttcttttctttttcttttttttttttttttgagatggagtctcgctctgtcgcccaggctgaagttcagtgacacgatctcggctcactgcaagctccgccttctgggttcacgccatcctcctgcctcagcctcccgagtagctgggactacaggcgcctgccaccatgcctggctaattttttgcatttttttagtagagacagggtttcaccatgttagctaggatggtctcgatctcctgaccttgtgatccacccgcctcggcctcccaaagtgctgggattacaggagtgagccaccgcgcccggccttcttttttttttttctaggcggagtctcactctgtcacccaggctggagtgccatggtgcaatcttggctcattgcaacctccgtctcccaagttcaagtgattctgctgcttcagcccccgagtagctgggattacaggcgcccgccatcacgctcagctgatttttttatttttagtagagacggggtttcaccatgttggtcagccttgtctcgaactcctgacctcaggtgatctgcccccgcttggcctcccaaagtgctgggattacaggcgtgagctaccacatccagcctattgatttcttttggagttttccttgtctgtcttcccatggaaggtatgagttccataaaagcagagatagtttgttttctttcctttcttttttctgagaaggagacttgctctgtctcccaggctggagtgcagtggcacaatctcggctcacactaacctctgcctctagggctcaaaggatcctcccgcctcagtctccagagtagctgggactacaggctcgcaccaccatgcccgccagttttttaattcttgtagaaatggggttttgctatgttgctcaggctggtctcgaactcctgacctcaagcgatcctcccgcctcagcctcccaaaatgctgagattataggcatgtgccaccaggctggcctgattttttttctttttgatcctctgctgtagtcccagctcttgaggcaggacttggcatacagtaagtgctcaataaatgccggttgaaggaaggataacgtcccagacaaggtggttgtgggtgtggggagcaggggacagcacttcctgggggaggcgatgagaggtttgggttactcacgatctcaaacttcttgtcgggatagaggcaggtctctcctcccgccgtgaagttgcaaaaaaccctgaacgagtcccgcgcgcagccctggttggggtcaatccagtattcccctgccgcagagccaggcagggtgggtgagtccggatgggacccgacggaccccaaccccccccacacccccactccgcccatccaagtggcggggggaccggacctcaccatcaggcaggtgcgggtggttgcggtgcagctcgtggcacacgaggcccgggcgctccgcagtgccgggaggacgccgcagctgctccagctccaagctcagcgatgtgagcgaggccagcacctcctccaggccgccctccacgactggaagcgggactgggacgaagcgccggcgcctgcgcagcccatgcagctcggcaggggcaccctgggcgtaggggatggggacggagaagagaggggagatgggggagggagagagagggagaaagagagacaggcagagatgaagaggcagacagacacaaatgagaaagaggagggagagagataaacaaggggcagagatagagaaaggagagataagcagacagggagagacacacaggaaagagagagacagattcagagatggggagaagccaagttgtaagaggacaaaagagaaagcgcaagaatagcagagacagggagagagagcagggagagagacagaagatgaaatagtggcgccagtatagacagagacagataagggagatggacagagacagggagggagagatggggtccaagagacaagacccaggtcagagcccccatgggtgtccccccaagtcccccctcccaggccagaccttccttggggttttacagggaactaccctcttcacctacatcctctgaacacctagtgtgtgcctggcccagtgctgcgcacggaaggaccctctggggacacccagacatagtccttgctctccccccaggttttggtgtccattcccccgccccccggggaactcaccggggggcctggtgggcctgcaggtccagtgtctccacgggggcccatggacccctgtagggagaagtcacttggagaatgaaccctgtctatggagacccttcccaccaacatacacacaaacacacacacacactcacacacacactcacacacacacagtctcacacactcacatacacactcactcacacactcacacacacacatacagccttggggaagagacatgcagttttcagcattaggcatcagacacaaattttcttttcatgttttaatgtctctgaaatcagcttcttaacatctttggcaagtcatagtttacttggcagaactgttttctttcctagcagtttgtaaaataatggtacatcttataattgatggcattttggatctgatgaaatacaaccgtaggtgttgaataaatatttgtcgaacgcacgattgcatgaataaataaataaatgaaggcagagacgtggagggttctggtgcagtgaagggggtggggagctgggatgtgtaagcccacggaagcagggtgtactcaccggagacccttttgagcctttctgtcctagagggccctgtagggtacagacagggagagctgaggtcctggcctggaccaccacagtgacctcatcccacaaaagattccctgcatactcaccgccacacctgggggcccagggtggcccagagagccaatgggaccagggggaccctaggaaaaggacatcgggtcagtattggtggggtacaccctattgccctgacacatcccccagacaagccttcaatcctaccaaaggaagaccccgaaccctagacaagcctccagttcccccacagagagaccccaaaccccagacgcagcctccaacttgccagttcccagatacatccccctattttccccacacacaccctcattaatccagacccacgtttcccagaccccacacccacagtctctcaaccgaccccctccttcaaatgcattcttcccgctcaggtcaggacactcacagggtctcccttgggaccagggggtccctgcacgcctggcaacccctgatctcctttctcaccagcttctcccggggggccaatgagaccgatcaatccaatgtggccctgaaggacaaaagaggcacagacaggggaggacgtgggaggattcagggaggtttttctcctagagccttagggtgatgagtttgggagcagaggatgcaccaatctcccagccccccagccagggagggagggaaagaggggaggagatggggaagagaataatggaatgatgtccttaccttttcccccttggggccagtgtctcccttcagccctgggaggccagagggcccctgggagaagagcaagggtcagttagggattctcaaatgtgaactcgaggtctgtgtgggtggttaggggatggtcaaatgggaaattatgcagatttcaaatgggaattaccagggatgaggtcaagggatggtcagagtaggccaccaaggtgggatgatgagagctaatgaggggttgactggaggatggacaacgtgagtggtcagtggccaaggtcagcgtgggtgatcagtgtagaccattaagatggagagtcagtgcaggcatcaagatgaagggtcagtgtggtcagtgtagaccatcaaggtggagtattagagcagagggttatagagatgggcagtgtagaccatcaaggtggaaggtcagagcagggggttatagagatgggcagtgtagatcatcaaggtggagtgttagagcagagggttatagagatgggcagtgtagaccatcagggtggaaggtcagagcagatggttagtagagacaggcagtatggacactcagatggatggtcagtgagggctagcctgcaccaatgctcactaggtggtcactaggtgcccagagtggtcctcagagccagaacctcaaggatgaacaagtctcttaccagggggccaggagggcccatctgtccaggggctcccaggaggcctggttcaccctgagaatggaacagaacatggggtgggctgcaccctgtcagaacacagtgtggacccccccccgaccatgcaccaggggcagcccctccaaacggtgatgggatcacaagctgggagcagacagagaggagctggatccaccctgtcccacccctgccccgctccactcaccacagggccagggatccctcgaagaccctcaggccccacacgtccagggggccctctagcccccattggacccgtcctccctgggggcccatcaggacctggctccccctgaaatggacacaggcaagggaggggccagagtcagagggttcctgcctcctgacccctgccaagaagcatctgggatcgggagggagtaggtgcacagagtggtcataggtccaccctctcctgatggccccactgttggcctagagtagtgcagggacccttccccttgccagggggactcaccttggcacctttctccccttctctgccttctcgacccatgtggcctgaaggacccttggaagggaaagacagtgaggggggtctaggggctgactgagggtcagaggggtgagtggggtctgggtgactggggggttatggatgagtggggtctgtaaggtgagtggggtctgtggggtgaatgaggtctgggtgagtgggggctgtgggtgagtgggggctgtggctgagtggaggctgtgggtgagtggaggctgtgggtgagtggaggctgtgggtgagtggggtctgtggggtgagtggggtctgtgggtgagtggggtctgtgggtgagtgggggctgtgggtgagtgggggctgtggggtgagtggggtctttggggtgaggtggggtgtgtggatgagtggggtctgtggttgactgaggtctgtggggtgagtggaatctgtgggtgagtggggtctgtgggtgagtgtgttctgtggctgagtggggtctgtggggtaagcgggggctgtggggtgagtggggtctgtggggtgagtgggggctgtaaggtgagtggggtctgtgggtgagtggggtctgtgggtgtgtggggtctgtggggtgagtgggggctgtggagtgagtggggtctgtgggtgtgtggggtctgtggggtgagttgagggctgtgggatgagtgaggtctgtaaggtgagtgggggctgtagataagctgaggacccaggaggtggcttatcacttaccctcttgccggggggcccgggggcgccgggctccccagaagctccaggcggaccctggaggagacaaggacaccagctgtggtctcagctaacattgtttgagcctgactgttttaggacgccttggaccagaggacacccttccccaagcctcaccccagcaccgggtactcccacctcccacctactccctcaagctgctcacattcctgggggtccccagagaggtgaagcgggagcatctgcaggggccttgggtaccccactagcccactcccctgcccccccaattcactcactcattagctccccaacccccgcctcagcaccacaccctctgttttcccactcaccggtcccccaacatcaccagggtctcccttctcccctggggaaccatctatgccctgcatggggggaagacagagttgggaggggtgatgagggtacgtgagaatttgggatggggctgggaggcaaaagaacgtttttggttccactgtcagtgcccaggtctgtgggggtagggagatggggacagaattaggaaatatgccaggattggggagggggtcacactcactgaaactccagggtctcctgggggccctagatctccgggcagccccgtggggccctggaacacagaatgattaataatcacatctctgaattgtggagcaatcatgcatttatggaacagatcaactgtatccaggaacagtttggtttctggggacacattagtgaacaaaacataaaatccctggcttggtagagcgaacattctcgtgtttcatgggtgcagacgctgagctaagaatgccgcacgcatggtctcactgcagcgtcctcacagcctctcagctcgggactcacagagaaaactggccattcatttgtctattcattcattgattcgtctattcattcattcactcattcattcattcattcatccatccatccattcattcatacactcagagaagggacacgccaaacaatgccattcaagtcgaggtcccacagatgctaaagccccttcctgacctccacccgccccaacctctactgtggtgacagaagggcctcaaccttcacctcaaagccaaatcccacatccaccccaaatctgacccaattcaaccttaatctttgcaacagtgttagaatgatctgccgtgaaatcaactttcttgccattcaatgatgtataaccactgcacgtttatgtttcattcacacatttactcactaattcaagtgttagaatgatctgccatgaaatcaactttcttgccattcaatgatgtataaccactgcacgtttatgtttcattcacacatttactcactaattcactcatccatccatccattcgtttattcactcatctcttcagtcattttgttcacttgcgcctctgtccattcattcatgcatccattcactcattcactcactcatttgtccattcggccactcattcattcatccattcattcatattcatgcatccattaatttacttattcatccattaatttactcattcatccattcattcactcatttattcgtgcacatttattcattcacatattcatatatccactgatttattcatttttccattaattcactcattcacccattcattccctcgttcatccattcattcactcgttcatccattcactcactcgttcatccattcactcatttattcatccatttattcattcacgtattcatccatccactgagttattcacttgtccattcattaattcactcattcatacattcatccactcattcattaatccatccatccacccattcattcattcatccgtgttctgggggttactcatgagatcagtaaattagaggatgcaatccctggctagaagtctgggagagttttggccgagcgcggtggctcatgcctgtaatcccagcactttgggaggctgaggcatgctgatcacgaggtcaggagatcgagaccatcctggccaacatagtgaacacccatctctactaaaaatacaaaaattagctgggtgtggtggcgcgtgcctgtagtcctggctacttgggaggctgaggcagaagaatcgcttgaacccggaagacggaggttgcagtgagctgagatcgtgccactgcactccagcctggtgacagagcaagactccatctcaaaaaaaaaaaaaagtttgggagagcttcaagtacattcaagtgccccctcccatgtctgcccccacttccccccaggactcaccacgctccctttggctccatcctctccagggggacctttcttgcctgggggtccagcagctccagatgggcctgagtcccccttttcaccaatgtctcccttgggcccctttacagaaagaggtcagaggtcagagtggcctggactctccagggatcaaggattagcatacttggattcaggcattggggtggtctgggacttttctggggtcagggttcagagtagcctaggttgtccaagggtcaaaggtcagaaggagctaggacttaagacagtgaaaggtctggatggtctaggtgcccattggtcatgtgcaaggttggcctagcccatgtgctgcccttgagtgaattagaagaggggccccatctgggcaactcatcctcaggtcaggactcatgactcagatttgagccctcacctatcccctgggtcatgtagtcttgtgtagtgtgcaacctgcagaactgtacatagcagccctatctgagaacttccaggtgtccttcctcaaggtaatcagggacggccacaggacaggggtgagtggatgatcttgcactgtccagaggtcaaagtggcccaagatgcccaggggtcaggggttccctgagttgggtgcagggaccacatcacacagtcactcaccgggatgcctggggctcctggaggccctgggtctccagcgtcccctcgctcaccctgcaggaggcaaagtgagagtggggagaggtcccatcctagcagacagggaggggctccccagaatgtccctgcccaataggactagatttatctcttccccccgtgcagcccctgccttccctcactcaccttctcacccacggcgcctggctgaccaactcctccaggcagccctggagtgccctggagagacagcaaggggtaagagtgggactgtggaatcccaacatcctcttcttaggaaatggttgtccccatctctgagccttcctggccccccaagagttctcacctctgatccagtggggccttggggaccccgaggacctggagctccatggggaccctgtggaaggtcagaattagtacccagtgaccccaggcccctctccccaaaaggccacattgaccacagataccactgtcaatgctggtgaccctcagggcccttaaaatgacaatgtccctcaaatgaatctaatgcctgccgccaacctataaccccaccatcctccccctcccaccttcctctgggagtgcataccatggacccgacgtctccgacctcccctttctctcccggagggcctggcagcccctgtggaacaaagaagcaagattggggcaccaggtagggagaatcagaagtgccacccccaaacccagacacccacctgcagtccaggagggccaatcacccccacaaagcctctgactccgtcatctcctttctgcccaaagaggcctgggggtccccggcgcccctgagccccgtctgctccctggaagaacacaaacaggggcacatttaaggtctgggtcagtgattagggcagagtgaggctcaagggtcaagactgaggttaagggttggagtcagggttcagattaagtttagagagggtcagtgttgagttggagttggggtctaggttaaggaacagggcttgggaatgaagtcaagggttgagtcaaagtgttaaacagtgagtcggatttgcagttgaggttcagttcttgggcagggttcaactggggttgagatggaatttagggttgggtttgaggttgggcccagggtcatattcaaagtttgagttcaggtctggggtcagcattggaagagttgggtcagagttggggttaaggatagggccgtatgttcctattgtatggtaataaacaaaaaaggacaggtctgggtcagggcttggttaagagatttgaagataaggcttttgtttgtttgtttgtttttgtttgtttgtttttgttttttgttttgttttgagaaggagtctcactctgtcacccaggctggagtgcagtggcgcaatctctgctcactgcaacctctgcctccctggttcaagcaattctcctgcttcagtctcctgaatagctgggattacaagtgtgtgccactgtgcctggctttttttttttttttttcttttccctcttttgagacggagtctccctctatcgcacaggctggagtgcagtggtgctatcttggctcactgcaacctctgcctcctgggttcaagcaattctcctggcacagcctcccaagtagctgggattacaggggcccgccaccatgcccagcaaattttttttttgtatttttagtagagatggggtttcaccattttggccaggctgatattgaactcctgacctcaggtgatccacccgccttggcctcccaaagtactaggattacaggcatgagccaccgcacctggctggagataaggtttgagtagaactgaggttaaggtcatgagtagagttgagactggggctgaagtgggggttcagagctgggtttaggttggaatttagtctgattttaaggttgagtgtatattggacatcgatatagaggggcagatcaaagttgagcatgaggttgagattgaaccagattctggggttgagtccatattggatgttggcattgaggggaagacatggttggagttgagattgagccaaattctgggggtgagttcatattggattttggtattgagggaaagacatggttgggttgggactgggcaggattctggagttgagttcacattgggtgctggtattgagggggaacacatggttgggttgggattgaatcagattctggggttgagttcacattgggtgtcagcattgaggggaagacatggttggattgggattgagacaaattctagggttgagttcatattgggtgtcggtattgagggaaatacatggttgggttgggattgggccagattctggggttgagttcccattgggtgttggcattgaggggaagacacggttgggtcgggattgaatcagattctgggggtgagttcatattgggtgtcggtattgaggggaagacatggttgggttgggattgaatcagattctggggttgagttcacattgggtgtcagcattgaggggaagacatggttcgactgggattgagccaaattctggggttgagttcacattgggtgttggcattgaggggaagacatagttgggttgagattgggccaaattctggggttgagttcacattggatgttggtattgagaagaagacatgattgggttggggttgactccgaatttgggattgggttcatactgggtgtttgtactgaggggaagacatggttgggttgggattgaatcagattctgagggtgagttcatattgagtgtcggtattgaggggacaacatggttgggttgggattgactccgattcttggattgagttcacattgggtgtcagtactgagggaagatcagggttgggtttgaggtttggattaagtcagtgtgcttccactgtcgtttgctcccactatccctcccttcaaggacccagagaaggactgaaaagatgggggcactcaccgggggacctgggtgtcctgcaggaccccgtatccctggttgtccaggtgggccctgggagaacaggaaacagaatcaaaaattccctcaggtttaagattagagagggcactggagctatcaatcactgcctcccacaccccctttatgagaacaacttcccctaccaggcagcaacagctacatccccccaaatcctgtcttctcagccaccaacagatgggatcagacagacgtctgtcctaagcccagccctggccacaagttccaccaagacccagggacgaagctggctcaatgatgcaagccactggagctgacattcggggtggggggaagttgggtatcagatgcttcagtgcctgccacgcagagtcacaggcagagggaaggatgtgtcactaacaatggagaaggttacccgcaccccagtgcctttccagttctttgggagccccagctgtccctatcctgtctgcagttgggttctgtggacccatcgctccaggcagctcaagtaccttctgttgcatgtaattgtcaagatggtacccgagaaggcagaaaactccatggcctctcctaccccatggagaatgatctctacatccctggcctcctctttcttccgctacccaccccaccctgccccactggggaccttcactcaccgcgtctcctttatcgcctttactccccttgtgtccgggggcacccacatccccctgcagaggaaatgggatgaaggacccagcttccattcacccccatcctcccctggacccttcctctctgtgaacccctcaccttgtccccttcctcgccagaaggcccagcagctccagggggtcccagaggccccaggggccctgggatcccatctttgccagtggggccaggggggccacgttctccctgttgtggggaatggaaagggggatgtcagggcaggaatgtcctgcaggagccatgtcctgggatgtggcagggccagaccctgaggaggccctaggaatgggatgggcaagtcacttacccgggaccccttcttgcctgcagggccaacggggccttcgctgccactttggccaggaagtccaatgcctcctgctgggcccaaaggaccgcgctcaccaggggagccctgagaacaggggtgatgaatcaggtataataccagtagtagctgtcctttatggagggtttttaagccaccaggcactgagttctgaggttaccaggattgtatctaacctgttcccctcctgcagcagccagagggtgcctgtgagcacctgaggggcagggcatattcttctcctgctcaagaacactccatggctcccatctcacttagaacaaaagccatagtcctcctggcagcctatacatatatatatatatatatatatatatatatatatatatttgtagagacaggacctggctatgttgcccaggctggtctcaaactcctgggctcaagcgattctccagcctcagcctcccaaagagctgggattataggcatgagcaactacacctggcccaagaaaaggggtttttatatgttgatggccaatgcacaggtaagtatttactggataaatgatctcaatgaggtttgtgatcatacatgagataaggcttcccatcatggctattttacagacaaggaaactgaggcttgccaaggaatacaacggcccagccagtgagcaacagaactgaccttggctcattgcaacctccacctcccaggttcaagcgattctcctgcctcagcctctagagtagctgggattacaggcatctgcctccatgcctggctaatttttgtatttttagtagagacggggttccaccatgttggccaggctgatcttgaactcctgacctcaagtgatctgcctgcctcagcctccatcatgggttttatcatgacaatgtcaagcttccaagacaccttgagtcccctccaccctgcccccacccagcacatggggttatacttacattggcccccacgggccctggggggcccttatcaccctttaagccagtaggtccctgaaggaggagataattcacagttaagagactcccaaaggtgtccccaggtcctgtcttcctctgtggggagctcacagtccccacctctctcctgggactggacactgagctttgaggggtctgccttccccagttccctccaccattttttttgctttcatcatttcccgcaccccaaatgctattccccatccctcccctgacccccccatcctttccttctctaagggacatgcaggagggtctccaaagatactcaccgggtccccagggccccctttggggccgggaaagcccctgagtccagctggcccttctttcccaaggggtcctggtggtcccagttccccctacaggagtgcaaaggagggaagtcaagctccagggaggggatgtctccctccaatctgtgactcagggccccctcccccatgagactgattctgagtccttggttgatcttggatgttcaaccaagatctccagtggacagtgtctcaccttggccccctctctgccttccaggccaggaagaccttgttcaccaggaggtccaggggggcctggaggccccctttcacctagaggtcccacttctcctgtctttccctggtgaggaagaaggctcctgttgagtgggggtggcctaggggagtcgctcaggagtccagctttcccctaaatatcccccaactggtacaaaacaagggaggtttatggagtccactctgacctgagggcctaagacaccagctggtccaggcgggcctgtctgaccttggaagccctagagagaaaaattaaatgtgggggcggtgttacatggggaagggatggaggagcaggagacagggaaggcctgataggatcaggaatctggccggtccggtggctcacgcctgtaatcccagcactttgggaggcagaggcaggtgggtcacttgaagccaggagtttgagagcagcctggtcaacatgatgaagccccgtctctactaaaaatacaaaaattagccgggcgtggtggcacgcgcctgtagtgccactcgggaggctgaggcaggagaattgcttgaacctgggaggcaaaggttgcagtgagccgagattgccccactgcactctagcccaggtgacagagtgagactctgtctcaaaaagaaaaaaaaaaaaaaggatcaggaatcaaaggttgaggggttactcaccagttctcctctctgtccagggtgccctggtcgcccatctttaccttggtgaccctgggggatgaggtgggaaaaagttggggcacagatacagggcttcctcccttcccacatcctccacccacccaacccccaatgagggtgacctcactcacaggggggccctttggcccagggaatcctggagggccttgcagaccagggaggccctgaaatggaaacagaaatcatgatctcatcccccctgcctccctgcccactccctgagccccacataatgacaacaggatcgagcacatattgagtgcttactgcatgccaggcatgggcagggcattctccacaagtcagtcattttattcaccactgtagccctttgggttggagactgaggttactcccattttacagaggagaaaactaaggcacagagtggttaagtgacttgcccaaggtcacacagtaggtgagtggcagagccaggacttgaactcatggctctctgacttcacaggctgtgctccttctttttttcttttcttaaagatggagtcttgctctgtcacccaagctggagtgcagtggtgtgattagctcacttcagcttccaactcctgggctcaagcaattctctcatctcagcttccagcataggtgggactacaggcgtgcaccaccacacccaattaagctgtgctcttaccactgcattataatgtctcttcatctcttgggtttgtcctccactcagaatctctctctctcacacacacacacattcacacacacacacacacacacacactcaccttttctccagggatcccaggggctccatcctggcccacatcgccctaggacagagtgaatgagactcaggccccagaacaaactcaactgggaagaatttggagggactggctgagcctggggcatggggggccttgattgcccacccatcccataccttggggcctggttgccctgtggcacccggttgccccctctctccacgggaaccctgaacaaaaaaaaaaggcaaagatcagatatgagggggtgggggagcctgggagatgagaccaagtcttccaggtcccctccccttgtgactccctctcctgcccgaccagggacattgatataacccaaaccctttccctgcccacagatgacctctccactacctttccttcccagccctgtccccaagtcccagcagggtagggggcactgtctattttcttactggtggtccccgctctccttccaggcctggctgccctgtctttccctgaaaatgaattgtaagagagaaagcagaagagagttagggtgcaaaggtatgacgcaaacacaaaaagacacccagtcacagacccagaaagctgtctgccacatatttattcacaagcttttcagtcatacacatacacacaaatacaacttatactcaaaaccacacaaagatctcaaacacacaattacaactatgattgcatctacagagtacaaacgtgcaagcatgtttgcccacaagacatatattgatcacagctgtgcagtatgcatacatgattgcatgtaatcatggcatgcatttggcaatccacagcctgaagatgacacagaactcatcatgcaatacatctcttgcacacatgtatacccactgtaaacacatgaaggcctggattcagctgaggactttgtcttggtaagcacagcagtatacatacactcatgtacgtacatacaatgttcattaacactgttacaatacacacatagcaacacaaatacaatacatgcatgtatacccatcactcagtgtgcacagaaacacacacatgtgtatacacatgtcctttcacgcatatgtacaagcttcttgcacacatttatgcccaccatcatgcaaagtgcacgcagattcatgcccttgttcacccaggcacaggcctgcaggctgcggcattcaaaccctgtctcatcgatattgaaagatacatgaaacacatatacatgtgcttacagtcatattcatgataataccatgtgtaatcacctacatgtgtcatgcattgcatataatagcatgtgtgcacacaaatgttccaggcatagacacaaacacccagggtccacccatcatcagacacaaccacacatgctgttcccctcagacaagttctcccctctcccttacccccggtcatgactcaccgacttccctttctctcctatgggtcccaggggaccgggaaatccaatagatccctgagtggagagaattagaaagaagacatgagggtgaggagtgagtggtgggtggaattggcccctcataccatcctttgaggcatttccaggtcactgattccagaagcttccttggtctctacagccccagcctcctacaaggcagccctcttctctcctctcccctcctctcctcccttctcatttcactgcagccctttgcactggctgctgtctttggctgaaatgcttgtctcctaggcctccacaaagtcagccactcctgaccatttagatctcattcagatgtcacctccttagaatgcctttctaccaccatcctggcttccacattgcccaagtcaccctctgtctgtcacattatgctattttgttttcccaagaacacttgcgttgaaatgacccttattgacttatttattcaatgcctgttttcccccactgtgacatagctcattggtcttattccccactgcctggcacacggtgagtgctttttaatatttgttaactgactccagtccatgctggaggaacccttcctccacctgggggaagacatcacaggctctgatatcctctcccacacctcactgtgcagactgagttcagatcagaaaagacagttgcccaagttacacagtctgtggtggcatcccgcctcaaagcccatttcaggctccctctactctcccttcccatctgggggttccatggtctctatactctttttttgtttgttttatttttaagagacagagtctcactttgtcacccaggctggagtgcagtggtgcaatcatagctcactgcagcttcaaccttttgggctcaagtgatcctcctacctcaacctcctgaatagctgggactacaggttcacgccaccatgtccagctaatttttgaaataaatttttagtagatatggggtctcactatgttgcccaggctggtcttgaactcccggcctctagtgattctcctacctcagcctctgaaagtgctgagattacaggtgtgagccaccaacctggccccaacactcttcaaggatcctgaacacatgcacacaaggactttctaaaatcttagtctatgtcaggtacagtggcttatgcttgtaatcccagcactttgggaggccaaggtaggagaatcacttgaagctgggagtttgagatcagcctgggcagcatagcgagaccctgtctctgtaaaaaatttaaaaattcatcaggtggtgcgcacctgttgttcccagctactcaggaggctgaggcaggaggactgcttgagtccaagaattgggggctgtaataagctatgatcgcactattgcactccagcctgaatgacagagtgacaccctgtctgaaaggaaagcaagcaagcaagcaaaaagaaagaagaaagaaagaaagaaagaaagaaagaaagaaagaaagaaagaaagaaagaaagaaagaaagaaagaaagagaaagagagagagagagaaagaaagaaagaagagagagagagaaagaaagacagacagaaagaaagaaagaaaaaagaagaaagaaagaaggaaagaaagagaaaaaagaaggaaaagaaaagaaaaaagagggggacgcagtgagggagggagggaagaaaggaaggaaggaagaaaggaggaaggaaggaaggagaataaagttgtccatcaaaactaagcttcaaagtttttttctcaatcgttaaaaagaaaaaaaaatctaagttaaaggaaaaggagtcaatgtaaagggaaatcactgaaaaaataaaaaaaaaaaaccactgtcaaatccaacgtaggcaagataactatcagctcaacagcacaaaaatgtgaaactctaggaggattctgcactcaattatcttcccaaatgtctattttttttttcttttgagacagagtctcactctgttgcccagggtggagtaagtggcacgatctcagctcactgcatcctctgcttcccgggctcaagcaattctcctgcctcagcctccatgtacctgggattacaggcacccgccactgcacccagctaattcttgtatttttagtagagatggggttctgccatgttggccaggctggtggtgaactctcgacctcaggtgatccactcgcctcggcctcccaaagtgctgggattacagccatgagccactgcgcccagccccaaatgtctttaggttcctgctctactctagagaaacagaactcatcagtgatataatatgggaatagtttaggcagaaaaatgaatctcatcagtgtcctcacccatcaaaacattggcaaacaaatgttatgttttcatataagtacgtttttgcataagtacatttgactataagttataattaattcaagatatgtaagatgtgtattttatgattctatgattctcccctttaactgactttgttggtgaatgaaacttaatcacaccaaataaaaggatcctacagttttataatcattgtcatcatcagcattatcaacattattataatcaaattgatgaggtggaaattactgggatgtctgtttcaccgcagagaaaacaggctcaagaaactttcccaagatcacatagcgggtaagagggcatttgaccccaagtctgtctgatgtcaaagctcactttttaaaaaaatttttgagacagagtccccctctgtcacccacgctggggtgcagtggctcgatcatagctcactgcaggctcaatctccttgggctcaggtgatcctcccatctcagcctcccaagtagctgggaccacatctggctaatttttttttttttttttttttttttgagatggaatcttgctttgtcaccaggctggagttcagtggtgagatcttggctcactgcaacctctgcctcctggggtcaaacaattctcctgtctcagcctcttgggtagctgggattacaggtgcatgctactatgcccagctaatttttttgtatttttggtagtgacagggttttaccatgttggccaggctggtctcaaactcctgacctcaagtgatccgcctgcctctgcctcccaaagcgttgggattacaggtgtgagccactgcccccggccacatctggctaattttttttttttttttagatggagtttcgttcttgttgcccaggctggagtgcaatggtgcaatctcagctcaccacaacctctgcctcctgggttcaagcgattctcctgcctcagcctcccgagtggctaggatcacaggtatgcaccaccacacccagctaattttgtatttttagtagagatggggtttctccatgttggccaggctggtctctaactcctgacctcaagtgatccgcctgcgtctgccgcccaaagtgttgggattacagccatgagccactgcgcccagccacatctggctaatttttgtatgttttcatagggaccacgttttgccacgttgcccagtctggtctcgaactcctgggctcaagcaatcctctcacctcagcctctcagggtgctgggattatagccaagagccactatgcctggccaaagcccacattttacattctctcagtgacccttggggtgggcagctcatcccccaagaccacagcctggacccccagatgttagtctctgaatcctgcccatatccatctccaccccccacccccagcttcctaccttaggtccagggcgtcctggataacctgggaggcctggcaccccaagcttgccctgcagaaaggttatgggacaaaggtcagaaattgcaacctggaggtcagaggcggaaaggtcaggctggctggggcatggtgaatgggctaatgggatgggagttggggaaacgaggttcaagtccttgctcctgcctgctaggggcatgtccttgggcaggtcattcagccattccaagtctcagttttccttgtctgtaaaatgggatgaaaatgcctattgcatgtggtggttatggatatgaacacataagttgcatgcattaaattgctctgtaatgctgagctgaggaattaaagatgacaaggttggtagcaacctcctgaggtcgaaggtataataaaagggcaaagggcagagggaaaagattggggacaccttgactgtgggaggctagagggtggagagtcatttaccttctccccagctgagcctgggggcccctcctcgccagcctgccccgcctgccccttcggcccctcaggaccatcctctccccggggacctggagctccgggtttcccctggaagaaaaaggagagtatttaatatccatcttttgtccttcctgctctgtctagccccagctcatcccctccctatcttccccgagcccccagacccacaccacccctcatctggagctggtcttacctgatcacctttgagccccacatcgcccttgaagcctgggaagccgtcctctccctgggtgggagagacagaggccagaagtgagggcctcggggaagggacacaaccaggaccccatgattgggactccctctcctctgatgagttccttctctcctcaccttctcgcctttctccccctggaggccccggttgcctgaagtgccctggaaaataaaaaaaaaaagctctcaagcctcttccctgcttaagaagtgacccagactcagtcccctgctctaaagcagccaggatagtcccaagaggaggctaggcagaagctgggaggggcagcttcagaagaaatgatctttccccagaggcccctccctccccactggaggcctctcaaggtcatctgtgcgggggtgtgcagggaaggccaaatttccaagtaagcgattcccatctcctggagacgctttgtccacagttccttctggcaggagaaagaggatgaacattccaggcccggacctcattttaaaggcaaaggaatgttccccattgtgccagctacaaggcgactctgtgcttggcaacaagatgacctctgtgcttggctatggagagagcgcttagttcaagtctggatgctgctcacaccaaactctgaaaactgcacttggctacaacatctctgagctcagcgggctacaatgaaattgcgcttggatacaatacagcccatgtggttagtctccagctacagacaaattcacttgatcacaatgtaactgagcttggctacaagttgttctctagctttggctacaatgtaactagactcaactacaacataggggttggctacaatgtaactagactcaactacaacataggggtcagttaatgtttctaaaggctgggcatggtggcttacacctgtaatcccaacattttgggaggcagaggctggaggattgcttgagcccaggagttccagaccagcctgggcaacacaggaaaacctcatctatacaaaaagtacaaaaaaaaaagaaaaaaggtagccggatgtggtgacgtgcacctatagtcccagctacctgggagggtgaggtgggaggattgattgagcctgggagctctaggctgcagtgagtgaactgtgatggtggtactgcactccagcgtgggtaacagagtgagaccctgtctcaagaataataataataataatcaaatgaaaaaactgccaagcctggtgggatacgcctatagtcctagctattcaggaggctaaagtgaggggattacttgagcacgggagttcaaggctgcagtgagccatcattatgctgctatattccagcctgggcaacagagaagaccctgtctctaaaaaataaaacatttagggccgggtgtggtggctcatgcctgtaatcccagcactttgagaggccgaggcggccggatcacctgaggtcaggcgttcaagaccagcctgaccaacatggagaaatcctgtctctattaaaaatacaaaaattagccagacgtggtggcacatgcctgtaataccactactcgagaggctgaggcgggagaatcgcttgaacctgggaggcagaggttgcggtgagcccaggtggcatcattgcactctagcctgggcaacaagagcagaaccaggtctcaaaaacaaaaacaaaaaaagattaaaaatgtaattatgcttggctacaatgtaactctgagggtgatgcttgccagactctgtgcctgctacagtatagccaattccttgattatagtgtgtctaagcttgtctaatgcacacatgttcaggtaaattacatctgtatttggctacaatgtcactggactcagcttccatatggatatgaactctaatgcccctgcacctctatttagccaggttgcagctcttggcttaacccagcatactgtgcttatgtgattctgagcttgggttagaacacaaccctcgggccaggcacagtggctcatgcctgtaatcccagcactttgggaagccaaggagggtggatcacctgaggtcaggagttcgagaccagcctggccaacatggtgaaaccctgtctctaataaaaatacaaaaattacccaggagtggtggtgcatgcctgcagtcccagctactcaggaagctgaggcagtagaatcgcttgaatccgggaggaggcagaggttgcagtgagtggagatcgctccactgcactccagcctgggcgacaaagcgagactctgtctcaaaaaaaaaaaaaaaaaaaaaaaaagaaagtaaagaaaagaaaaggaaaaaggaaaagagaaaagaaagaaatgtgtttggcctctaatgggcttagctgttctaacaacaaggtgacaaccacactgtaaggctgtccttggctgtgcagctccaaaccccagtcccactacatttggcctggccaactgattcccctctccacacatccagaagtttctgatggagctgcatcgcatgcctgaacccaaagctggtaaatcactcatacctgcaagcgtatcacctaccttcactccccgaggtccaggatagcccggagggcctgccgaccctggtggaccctgggaggaaaataaggtcagtgccattctagacagtcccttccacattctaagagccctcatctctctcctctgtggcccctgactgcaggccctgcctcccgaccctcgtccccaacccagcctaacctcctggtcactcacctgagcccctttctctcccgtggggccctcatgtcctgggtgaccctggggaagaaacattctcagttgtcagagaccaaaacttgccattccaattcccaaggctcccctttctccttcctccttttcccagctcatggttctcaccagagggccatcggatcctgggaggcctggaattcctgggtttccagggggaccctgaaagaagatgaacagcaggggagagacagaggtgctcagagccctggagcaccactaggatctacgcagacatgcagccgcctcaaggttaagaaataagcagacctcactggccaggaaatctatcccagctctgcccaaacttgctgtgtgaccccaggcaagcccatttccctctctgatcctcagaaatccactgcctctgggaaggttgcaaggaagaacataaaaacagtacaagattgatagcacaacagggtaactatagtcaattatatgtcgcccaggttggagtgcagtagcatgatctcagctcactgcaacctcttcccaggttcaagtgattctcctgcctcagcttctccagtagctgggactacagcacccggctaatttttgtaattttattagagatggagtttcactatgctggccaggctggtctcaaactcctgacctcaagtgatccacccacctcggcctcccaaagtgctgagattacaggcgtgagccactgtgcccgccttccctggcagacacacttctgtgtgataatttacttgtacatttaaaaataactaaaagaggccgggcgtggtggctcatacctgtaatcccagcactttagaaggccgaggagggtggatcacctgaggtcaggagttcaagaccagcctggccaacatagtgaaaccccgtttctactgaaaatacaaaaattagctgggcgtagtggtgggcacctgtaatcccagctacctgggaggctgaggtggcagaatcacttgaacccgggaggtggaggttgcagtgagctgagatcatgccattgcactccagcctggacaacaagagtgaaattctgtcaaaaaaaaaaaaaaaactaaaatagtataactggattgtttgtaacacaaagaataaatacttgaggggatggatactacatgacatgattcttatgcgcatgcctgtatcaaaacatctcatgtactccataagtatatacctactatgtacccacaaagataataaataaaattaattttttttttgaggtggagtctcgctctgtcgcccaggctggagtgcagtggcaagatctcggctcactgcaagctccgcctcccaggttcatgccattctcctgactcagcctcccgagtagctgggactacaggcgcgcgccaccacgcccggctaattttttggtatttttagtagagacagggtttcaccatgttagccaggatggtctcgatctcctgacctcgtgatccccccatctcagcctcccaaagtgctaggattacaggtgtgaaccaccgcacctgaccaataaaattaaattaaaacagtgcaagagacatgttgaaatagaagcttcacagccacacccctttctttaaaaatgcccagccgggcatgatggctctcgcctgtaatcccagcattttggggggccaaggcagatgaactgcatgagcccaggagttcaagaccagcctgggcaacacaggcagaccccatctctacaaaaaaagaaaataagaaaagaaaagaaaaattagccaggcacagtggcatgcgctgatagtcccagctactcgggtggatgaggtgggagaaccacctcgcctggggaagtcaaggctgcagtgaggcattattgagccactgcactccagcctgggcgacagagtgagaccctgtccacaccccccaaaaaaagatatgtgcagaaagaagtgtgtctgccagggaaggcggaagcagatgtgccagggaacaaagatgagacccacagggcctgtgcctcttggtaatatcttctgtgacaggcttctgtgggctctctgtatcctgacaatatcccttatgtgagctagccttggtgggtttctgtttcttgcaaccaatccttccccaacaaggacactttgtatctccgggctggcttagggaatgttgcagtctatcactatccagagctaacagaggggtcttggtgggaagattttcctggcaacagagttgaaggaagaagacttgaggaggtcgcggtaggtggagctgtcactcaccttctccccaggagtgccaatgagtccctggggaccggggagtccctggagacagaaaaagaagatgagagaaggcataagaaagaagcggtgagtgtggaggttgggaagcctggtcacggtctaaggtcttaactgaccactcccatgccccattattgggaaagacagttcaaacctgggacccatggtttccctgctgtcccggagggcctggttctcctggaggaccctggggagaaagtggggtttcagtgaagctaagaggggtcatggtgttggggcgttagtgaaattgacttggggggggtcagtcatggaagggaatagggatgtggacaatcggggtcagagtgtcagaagggtcagaggtcaaagggcacagggcacataccacattgcctttggcaccaggagcaccatcaattccagtcacaccctaggggaaaagaggatgtgagaccaagacagagcaacaagctgggagcctgagtctgagacaccgagagatgcaggtggaaaggtgagcagggccgggcactgtggctcatgcttgtaatcccagcattttgggaggctgaggcaggtggatcacctgaggtcgggagtttaagaccagcctggccaacattgtgaaaccccgtctttactaaaaacacaaaaattagccaggcatgtaatctcagctactcaggaggctgaggcaggagaatagcttgaacgtggaaggcggagtttgcagtgagcagagatcgtgccattgcactccagcctgggcaacaagagcaaaactctgtctaaaaaaaaaaagaaagaaagaaatgtgagcaggcagagaagccagcaacagatatggacatgcagaaggcagaaaagcgagaaaaaaaagacagacaggggccaggaacagtggctcaggcctgtaatcccagcactttgggaggaccacttgaggccaggagttcgagaccaacctaactaacatggtgaaaccctgtctctactaaaaatacaaaaattagccaggtgtgctggtgggtccctgtagtcccagctactcaggaggctgaagcatgagaatcacctgaacccaggagccggaggttgcagagagctgagatctcgccaccgcactccagcctgggcgacagagcgagaccctaatctcaaaacaaacaaaaagacagacagggatgcagagagccagtgacactcaccgggcgacccgtggggccaggagagcctctggggccaagcagtcctcgtggaccctgcaagggagcaggcgaattatttccacatcacctctgtgtggccatgtgagctctaggggtcctatgagtcctggggccctgggagtcctgactccctcccctgcaccaagcaaggggcccagggatccctgatactcaccggctccccagcctggccagtgggccctggaggtccctctgctccctgtggaaaagcgtcattacttgggaacaggaaggtacaaccctcggagagccacctcccctcatctgggcagccccttccagggggtctcggaattagaccaggatccctgggaacctgcagactaagttcatgggattccattcaggcccctgactccaatcctagacctgcaagtctcacctcctcaccccacaatttgtccctagctctcaagctggccactgagacctccagatcttcctctctgattctcactcaggcttccaaacttactttccaaaccaggccctaactctcttccaaacttaccctctcaccatcctctcctgggggaccgggttgccccacatggccaaagtcaccctggagagggaacagaggggagttcagagtggaagggtgtgggcggagagaccagccccctgggaaggcagatggggtgtgaggagggacacagggatcatgactctgatactgagggagaagttgggggggcttgaatattgggaggagggcttagacttgggggagggacctcacacactcaccctttggcccttctcaccaggcagcccagggaggccatcgaagccacgatcaccctgtccagagacaccagtgagccttgaccccataagcctgacagctcccaccaagtcttatctcagcccccatcacctaccttaggtccagtgtcccctgggaggccccgagctccatctgctccagggcggccctatggagaaagtaagcccaagagtcaaggatgagccttccctgtacccctccaccaaattaggaacccaacttcatcatcaacatcaagattttttttttgacagggtctccttctgtcactcaggttggagtgcagtggcacgttctcagctcactgcaacctcagcctcctgagtagctgggaccacaggtgcatgccaccaggcctggctaattttttatatttttggtagagatggtgggggtttcaccctgttgctcaggctagtctcaaactcctgaatgcaagcgatccacccacctcagcctcccaaactgctgggattacaggcatgagccaccatgccaaggctaagatattattttttttaatttatttatgtattttagagctgaggtcttgctctcttgcccaggctggagtgcagtggcatgatcatggctcaatgcagcttcgaattcctggctcaagcaatcctcccacctcagcctcccaagtagctgggactacaagtgcacaccaccacacctggctaattttttatttgtattttgtgtagagaccgggttttgccatgttgcacaagctggtctcaaactcctgggctcaagccatcctttcacctcagcctcccaaagtgctgggattagagataccagttgctatgccatggctgattttattttattttatttttttgagatggcgtcttgctctgttgcccaggctggagttacatatatgttttacatatatatatatatatatatatatatatatatatatatatatatatatggtcacatgtcactgaacaacagggatacattctgagaaatgcatcagtgggcaattttgtcattgtgtgaacaagatagaatgcacttacacaactctggatggtacaacctaccaaacacccaggctatgcggtataacctagtgctctcagactacaaacctgaacaatgtgcgactgtactgaatatcacaggcaattgtaacactatagtaagtatttgtatgtctaaacacatccaaacatagaaatggtacagtaaaaatacagtattataatctcatgggaccagcatcttatttatttattattattattattattttttgagacacaatctcactctgccacccaagctggtgtgcactggctcactgcaacctctgcttcctggattcaagccattctcatgcctcagcctcccgagtagctgggattacaggcgcacgctgccatgcccggctaatttttgtatttttagtagagacggggtttccccatgttggccaggttgatctcaaactcctgacctcaaatgatccacctgcctcggcctccctaagtgctggtattataggcatgagccactgcgcgcagccaatcatcttataagcatcattatgtggtgcatgactctatctgaagttgacttgtttgtcatttccttccatgtgacaggcctcttttttgccgtgctgtttcttccacttccccatctgttcatctggttctatttcagatctcagggcaagcatcactcctgcaggcaagtccttcctgactctacggcctggccggattcctttgacacacactcagtggagctgccattccctgccttcagcactcttttcccactaacgacaccagcagaccccaaggtcacaaagccaaggctcatgttgggtgttgagggatggataaggggtggtctggggacctagctgtcactcaccatcttgcccactcggccagggggtccatgaggtccctgcaggcctcggggaccctagaagaaagcaaaaaggaggaaggaaaggaaaataagaagaaagagggacttattctattgtattaaaaaaaattagagatggggtcttgctgtattgcccaggccagacacctgggctcaagcaatactccctcctcagcctcccaagtagctgagacaagtgtgtgccactgtacccagcttggaaggacatatttatttattgtatagacagggcctccctatgttgcccagactggtcttgaactcctggcctcaagcaatcctcccacctcggcctcccaaagttctgggattccagatgtgagccaccattctctaggaaagtcatcaattgcaagggtatccccagcccctttggcactttccccatccagcactgtatcttgtggtcctgggggaaggctattcccatcctatcctgccctatctccacaagtctcacctgtggcccttctgctccctcctctcctttcagacctggatgcccggggagacccttgggggaggagagatggaggagtgtgggtagatgattcttcactaatgcatgcaccgccccctccacgcagtcgccttactcaccacagggcctgggcgcccagtgagccccactggaccaggggggcctttcatagagagctggaaagacagaggagtcagagcttggggcctcccacaagacccccaacattccccacagaggcatcttcaggagaaaaataacccccttctcctgcccagcccctccttacgccgaggctctatcactctctggggttcctcccactatgtccacacctcccactcacctgagtctgctgcagaactgcctgagcctgggcctgctggaatgagactggggggcctttaaaggagccgcctgcaaactggaactgggaggaatttagtggtgagggaagcccccaggagaggccccctcctggatcaggactccactccccaaggctgggccactccatctccttcttaccggcatcatgatcacagtgcccggtgggcctcggatcccatcaatgccggggattcctgggaggccagcagggccctgagagagggatgggggaagagaggtggagacagggagagagggagagagagagcgaggacaggggaggcacagaaggatgagtcagaaagagagagagagggagagatggagagagacacagaatcaaagagggatcatggcaaggaaagagagagaagtagagagaagtggaaaggaaaagacagagatggaacagagacaaagagaaggggagagagggatggagaaggatgggggcagatggagagacatacagagacagaaacagagagacagagagagatagacagagacagaaaagccagtgaaagacagacagagatggagaaatagagagagaggcgaacatagagagatggacggagggagagggacagagaccaacagagagagacagaagagagacagagacagagtcacaacaggagaaagacagagataaaagacactcagaaacagagacaggcaaaagaagaaaagcaaagagtaggccccagcaacacaaggtgaaccagagaaatagttcacagatgggagacagagaacagaagaggtcagtgccagccccgggatggtgttcccgagtgccacaccctcatatctatgttcagactgtcacgctcccagccccaaacctcactcctctgagaagtgtacaccccagtgggagtctcttaccggtggaccagggtcgccagggaatcctggggggccgggagggcctgaggggccaaccaccccctgttggggacagagaaacaggagtcacaggaagtgcaaagtttgagctaggctgactttcaacctaccactgactctaacctcaggctgacctccctaccccactacagagccactccaactcccctaatgcaatactgacccccactcacccccaacgctactctcggacccctcttctttttttagagacggtctcactctgtcacccatgctggagtgcagtggcgtgatcatagctcactgcagcctccaactcctaggctcaagcaatcctcccaccttggcctcccaagtagttgggactacagttgggtgccactattttttaaaaaaatatatggctatttttaaagagatggggtcttgctatgttgcccagtctctatattgttcatcctccctattttgactcaccctttaagcctcaaatgtccactaccctccacttggccaggcaacattacaccccaactcctcactccaggggattaaacacccctcagctggaagggaaagactggaagaaggaaacacagccatgacttacttggggtcctggggctcctggaggtccctcaaactgctgcccctgaagggagaagtgagtgtcggtgaccgctgtcatcatgaagcctctcaaccccctcacaatccagacccctcaccttttcaatcactgcgggctctccttttgctcctttctctccagcaccctggggtggggtcaggggagatggagagaaaagagatgtgaacttggacataagcccttcagttatctgatcacacacacttgcacacacacacacacacacacacacggagtccaccctcagagccccttctcctctactgtaaccaatatgcactgagaagctcagccccccgcatccaccgggcaatgccatgccaaggtgaatgaagagcgtgaaatccagagactgctgcccaatactgatcctgcatctgcctcttactaactgagtgatctaactaagttgggaaacttagtcaacccctatggccacttacaggtaaccggtcaacctgtaaagtcagtggatgaatgacgcctgtgtatatatcatgcaaagatgaatgaattaaaacaatgcttggcacacaacaagcactccaggtaacaaggtagcaagggcaagttagttacaactatgtgtctatgcgcctcccctgtggaacacctaggcttttcctttctccctttctttctttccttcttctttttctttcttctttttttttttttaaatggagtcttgctctgtcccccaggctggagtgcagtggtgtgatctcagctcactgcaccttctacctcctgggttctagcgattctcctgcctcagcctccccagtagctgggactacaggtgcccgccaacacgcctggctaatttttgtatttttagtagagaccaggtttcaccatgttggttaggctggtctcgaactcctgacttaggtgatccacccgcctcatcctcccaaagtgctgggattacaggcgtgagccaccatgcttggctccttccttccttcctttctttcttttctttctttctttctttctctttctttttctttctctttctttctctttttctttcttctttcttttttcttttttttcagagtcactctattgcccaggcaggcttttccttttttctctctcttttttccttccttccttccttccttccttccttccttccttctcttgcttgcttgctttgcttggcattttttttttgacacagggtcactctattgcccaggctagaatgcaggggtacaatcatggctcactgcaacctcgatctcctcagactcaggtgatcctccctcctcagcctcctgagtagctgggaccacaggtgcacacagcaccatgcccagctattttttattttatttttttgtagagacagggtcttgctatgttgcccaggctgaactcaaactgggagccactgcacctggccttttttcttttctttttttcttttttcttttttttttttttttgagacagagtctccctctcgcgcccaggctgaagtgcagtggcgtggtctcggcttgctgcaagctccgcctcccgggttcacgccattctgcctcagcctcccgagaagctgggactacaggcgcccgccaccacgcccagctaatttttttgtattttttagtacagacagcgtttcaccatgttagccaggatggtctcaatctcctgacctcgtgatcagccctcctcggcctcccaaagtgctgggattacaggcgtgagccaccgcgcctggcccaagcctcttttcttttctctagagaaaggtcttgctctgccacccgggctgcagtgcagtggtgtgatcatggcttcctgaagcctccacctcctgggctcaagcgatcctcctgcttcagctgggaccagaggcacgaaccaccacgttcgattaattttttgtatattttgtaaagatagggtctcgctatgttacccaggcttgtcccaaactcttgggctcaggtgatcttcccgcctcaacctaccaaattgctgagattataggtgtgagccaccatacctggcctcagttacctcttgatctctaccctcttctcttctccctgcccttaacataaaaaaaaagcctaaaatttgtactgacttaagatggtgcttcggaacaacagtccaccatcttcttggtttgctgtctcttggaataaacctgcttttccttccaccaattctcgtctctcttgttttcctttcaaacatcaagccaccgagcttgggttcggttacatcgaatgcgtatccatctttctccaagaccaaaatggagcatgtcccaaagtggtccacttctctgcgtccctcccatcttcctccaggtcacgtcccgactgcagattgcgggcttccctgctgcccctctggctccccctactgtccatgtgccattcagcagccagagagctcttttttttttttttttttttttttttttttaagagatgggtctcactgttgcccaggctggcctcaaactcctggcctcaagcgatcctcccgcctcagccgcccaaagcattgggattacagccgtgagccactgcccccggcccagggggagcttttaaagctccaagtcagatcatgttccttcacaagtgctcaagtggcatctcctggtgcttggagtaaaagccaagcgcctctctctagtcacagagtcaactattagcacagtgcctgacacaagcaggtgcagaagtcaaaagagagactggcctttcgtggctccaggtagaaatcccttctaagacctcaagatgtgagaaaagtaagtaaataaaataacacaggaacagaagaccatataccacatgttctcacttataagtgggagctaaatgagaacacatggacacatagaggggaacaacagacactgggacctatcggagggtggagggtgggaggagggagaggatcaggaaaaataactaatgggtactaggcttaatacctgagtaatgaaataaataatctgtacaacaaaaccccatgacacaagcttacctatgtaacaagcctgcacttgtacccctgaacttaagataaaagtttttttaaaaaaagaaaaaattaaattaaataatttttttaaattgttcggttttttttttcaagatggagtctcactttgttgcccaggctggagtgcagtggcacgatcttggctcattgcagcctctgcctcccgggttcaagcaattctcctgcctcagccttcccagtggctgggatcacaggcgcgcgccaccgctcccagctaattttttgtatttttagtagacatgggatttcaccacgttggtcaggctagtctcaatctcctgacctcaaatgatctgcccacctaggtctcccaaagtgttcggattacaggcgggagccactgcgccctgcctaaataaataaattttaaaaaaattttaataggaatcccactctcttgcacctaaccccagccacctagaaactcacaggaaagatctggaactgagtccgagatggatattctgctgcccggaagtcagggcccatggtggaatcatctccttcttcatcctccctggctgccttggtctccagggtccccagctcggttccactgtcagggtccaagctcctctgagaacgttaggaaagaccaaagttttccctgacctccttattttctgccacccccgtaacccttggggtctcccctcttccatccccatccaacctctaggatcgtggcattgagtccagtagtcacagtggaggtgacgaccaaaggcgtgggggtcggaggcagatttggagctggagtctctgtcttggggatgtcagtggaggtctggagcagggatggagggagccttgggtctcgggtgagggcaatcaagacaaaagggaggcaccctcccactgtccccaggagctcccagtccggggacagggacagaggaggctccccaaagagcaccagaggccaatggagacaaaagtgtgccagctggaccagggctgccagcagagggagccaccgtggatggaggaggtgctgagtcaggctggccctgaagcccagtggtcaaggtcaaggtccaacattcagggccaggctcccggaagcctagcccacatgtcctctcccaaggcagagttcagcggccagcaggccacagtcagagagggagtggcggctccttctggcctggacagctgcagaggaactgggtcaaggtgggggttgggggggtgtgggaagagggtggtggggtcccaggtgaggggacaaggctgaggaaggggctgaagaggggcccactactcctggtgtttgtattcttggccaagaagatctggaactgagatgtagtgcaaccagtgactcccccaccagccaaagaccccaagcaatgacccccaccaaggaccccccaacccagtgacccaccaagaatgacctacatcaacagaccccagtgattctagaaccagagacccacaaacaacccctcccactcccatcaatggcctcaacctgttactgctccattcagtgattttcctaaccagtgacctcaaccagtgacatctcttggctattagcactaactagtgactctccaactaataacccccatcggtgacccctaatcaattattcctctaaccagtgatgctccaacagtgaatacccataaatgagcgcaacaaaagcgtcctaaccaatgacccccaaatagtaattccacccatcaatgacttcctaactaataattccctcagggactcccaaaccaattaccccatctgcgaccccctgaaaatcactcttccaacttgtggccccaatgagtgaccccactatgacttccagtcagtgaccacccaccaacaaccccccagtcattgaccccaaactagggacatcagtaacaccaataatggtttctatccatgaccttccactgtgatccccagctaggtgcagcccaaacactgacctcaattaatatctccctcaatgattccccactatccagcaatccctatcagggaagccaaataatgcccccaattaatgactctcccaatgaataactgtccccagtgaccccaagcagggaaccccaaacaatgacacactaactaatgaacacgtcattcaacccagccaatgatccccccttaaacagtagccctcatcaagaactcccttaaaatcaggaacttatctgggtctgtcccctccctctagtgccccaggactggagattgagggggtcagagatgggagagatcataagatgggacccacccccaccctgttatcagtcaccctgacagtcatcagtcagctgagagaagtcagagctcatggatccgagaccagagaaaaagatcatagatgagggaccagagattagtagagatgggagactagaagtcaagcaccaagaccagaagtcagacagtcaagaccggaagtcaggtggtcaaaaccggaagtgagaggtctcagggcccttacctggttctctgcggagtcaggaggtggacttgaggtccaaatttccttgttctttttcctgcccttccccttgcgacctcgccctttcttcctcccttttcccttccccttccgccgaggacgaggggtttctggttcaccctggggagcctgggagaagggttccagtcaggtctagagcatcccaccagcagagaccccatcattcaggtcacctggggtgaggctggctcatggcccgtgggtcctcactcagccctgtgacctggagtcaacgttattcatgtaacctggggtcaagggtggctcaggaatatgacttgaggtcaaagtcattcatgcctgggatgtgttggaggtcacgggtcacttaaccccatgtctgggggatgagaattcactctttctagggatctggagccaggaaggacccagcctgtgtcctgagattaggagtcatggagtccctcactcaccactgtggctgccggtgccaggttgtcacagtcggggaggtaccgctcacaagcctggaaggcagcctgaggatctgggcttatcagcagctcctgaatgtctccctgggggttgggggtgtaggagtcaaggagggcagccatacagccataggcttactctgaccccctaacccccagcagtcctgcccacctcctggcaccagggtgcaatgctcccccacccagagcatgctaagtataaggaagagatgaccccatcacagccctagtgatctctctaccccctgtaactaagagaaggaaagatcctatcaggggcacacccgatcccaaccacaagccacatcccacacatctgccccactagaggtgcatcagttccttcaccggttcaagtgattctcagcctcccaagtagctgagattacaggcgtgtgccaccacgcccagttaatttttgaatttttagtaaagacaaggttttgccatgttggccaggctggtcccgaactcctggcctcaagtgatccacccgccttggcctcccaaagtgctgggattacaggtatgagccaccgcgcccggccaagaccataaattgtgacgatgcctacttggcttgttgtgggaagagctggtactggggataaggaggaacatgagatagatcaggtccctggcctcccagaggtgacacacatcacggtcacacacagctaacaaaggtctccacacccagaacacatatcacacaaccacacaacacagctgcctgctggctcccaaagtcataaccgcccccacacaatcacacactatcacagcaaccagcaccatctcaggtcacagtctcagacacacgacaccaccagatctttccacaacaagccaagtaggcgctgtcacaatttatggtcttgtggctctgcaatctcacagtcatgcactgcaacggcacacacaagcatgcactggcacaactggatcttcccacaacaagccaagtaggcatcgtcacaatttatggtcttggccaggcgcggtggctcatacctgtaatcccagcactttgggaggccaaggcgggtggatcacttgaggccaggagttcaggaccagcttggccaacgtgtcaaaaccttgtctctactaaaaattcaaaaattagctgggcgtggtggcacacacctgtaatctcagctacttgggaggctgagaatcgcttgaacccatgaggtggaggttgcagtgagctgagatcaagccactgcactccagcctgggtgacagagcaaggctccatctcaaaaaaaaaaaaaaattattgtcttgtggctctgcaatctcacaatcacaggctgcaacggtgcacgaaagcatgaactcgcttcccttagcttcctggggatagattgaagcttgacatcttccttctttaatatcctctccagattcaggctgtagacaaaacatcccaccctctgcctcagtttcccccatcactgaactcctacctcgaaagtcttttccccaaggtcctgggtccccagcacagtgagtccagctatgctgatgaagcgggggccatggcccaaaacagggggctgagcttcacagtcagctaccagggtcaccatctcaccatctatgctgacggccacacggtgccacctgcaaggggacggcctcagtgcgggtgcttctcaccccaccccttatccacggacccccgcccactctccccatgctcacctgccatctgtgaggttgacctgctgggggagggggcggaaggggtcacctaggagacccagcgctggccccagtgccaggcccaactgccgggcacccctttcatcataaatggacagcaggacagactgattggctggctgtccccgcaaggtgatcagcaaggagaagttctcaggaaagtggccttctgggtgggcagagggaacaaggcagctcagagggcccagcagtgcctccctccggggaggtacccaggcctcctactccaactcacctggaaagagttcccacgtggggatgccgagcgtgctggcctggccaattctgaatgcccggtcaccctctggagtcctctggggacagaagccaggcccctcggggaccccagcctggcctccctgcacacccagggccttcaggacatccacaggatctgcagcagagagaagccgggggtgtcaggcagaggtggggaacagctagaataagcccaggactccaggatagaggctcagggtttttttagggggctcagcctctccctccctcccaccatgtttgtggctcaggaagaaggagccggcctgggcccccagcaccccccgcctcctcaccaccccacagatgttccgacctcagcagcttgttgactctgtttttttttttccccttggtttttggtgagaaaaaaagttgacctagttctgggatgaatcaaaacttcctggcctaagccccagagtggaacggtccccctctccctgctctcccgcgcaggctccctagggctatatcccaggcctggagcccccttgccaggggaaacccacgtggagaggaggggcttccagtgtgttttcttcccccacctcctccctctctctaacctcctcctttgaccaccatcacccacaacctcttccttttgactacagccattttggatctcctccctctgaccatctgcctctgaccatgcccactaacttctttttctggttaccccctctgaccttctgatcttcttctgcctgaccccagcctattccctctgatctcctttttctgtctgatcccaaactcctccttctgaatttcccctttgacctcttccctctgactttcacctctaacctcttccctctgaccctcctctatgaacttcctctctcagactttgccctctgacctcctccctctgaatgtctcctctgatctcctctcctgactttcccctctgacctcctccctctgactttcccctttgacctcttccttctgactttcccctctaacctcctccctctgactctcccctatgacctcctccctctgagcctcccctctgatctctcctctgactttcccctctgacctcctccctctgacattcccctctgacctcctccctctgacattcccttctgatcaactccctctgacctcctccctctgactaccccctgaccttctcccactgcctatcctgatctcctccatctgacccatgacctcctcatttcatctctctgacttcctccttctgaccagctgtctccgataacctccagacctcccctgtctgaccctctccctctttcatcccagctaaggaaaggacttgtctggcccaacagttcctaatctaggccatgctaccagccccaccccagcaggcagcccagccagtgctaagtggaaccacatggcttgggcaggggcgggtgggggcttcccctgggccccgagcccctgtctgattcccccatcccccaaccctcagcaaactgtcccactgaccccctgccccagcctcttggcgggagctggattctccagaatctgccatgacctcacccctgggggcggctctgctgatctcaccacggggagctggggcgggggggctaagacgttggggaggcacgggcttggatgaaggacccccattcccactcttcctaggtcagaaccctcattttccagactcctcggaggcctgtttcagcctctgtttcctcttgcctccaatctccttctctccccatccctgcccgccctctctctgtcccactttctgtgccgggtctttccaggcctccatctgtgtccaagtctctttctctctctctctctctttctctcattctctctctctcttctcaatctctctctctctccacccgccttccccaacccatcaccccagcccccatctctaattgcctgttttgtggctaggctgtcattaagagaaatctgggttgcagtcccctggggctgagatctgggctcccaggctctgctgaccacaagagtcacttccccacggaacaatcatcccagctgccccatctcagcctggggcccagggcaggattgagaccgacgacctcacccagcctggaggctctcccctgacccgcaccctaacctctctgcagaggaaagagggtcttccctcaactaccactcatttacattaagaaagtccttcccggcatccaactcaaagctctcctgcttgaaacttgtgtcccctctggaatgacctttcagaaactgactgccctttcttttcacagctggcattatgacaaaaaggcacacaagctgcattgagtcctgcctacaggggacaaggggtgggggggtctgtcaggggcccagcctgccccctgccactctcccctgtgctggtcagggcccccacggggatgttgggtggggtctgggatgtggagggacagaggcggggactgagtcagggcatggctgggaaccccccaggtgtgcgatgtgtgtgcaaatacgtgtatgtgcatgagattgtacaagcgtgggtgagtctgagtgagacaggcagagaatagctgggcatatgtcgtttctccaggtgtcaatgtgtgcaaatatttggcttctaatggagggattagatacacttgcttgacgtgtggccatgcaacgcttgccgtgagcttgcaggtgtgtctgtgactttaacacctcggacttctgatgggggagtgccgttctgtgtgagagtgtgacccagtgggtgagtgggtgatgggttgtgaatgttgacagtgtttgttcggatgtcaggggcagcatgtgtgagaatttgagcacgtgggagggtcataaaagctgggaccatttggcgggtggctgaagggggttgcctggacacggtgtttcacattcctggagtcccaggggacttatattcagagtggatgcctaagattccatgaccatgtggatgtgtgagcgtgggaatgcggcatagtccaatcagggattaaccatatggacaggcaccttcctggactccaaagtaagaagtgtgctgtggtgtgtgtgtgtgtgtgtgtgtgtgtgtgtgtgtgtgtgtgtgttgggagactgagctcaccttagaaagggatttccaggaggacctagtctagggtctctcagatcagggaagccccatctccaacacttgagaagctacgccatcccctgactcccgaagcgccccccactctgaaccctgaggggcgggacagggcgcccagccagatgcgcgcagctgggcgtgcgtcagcgctgactcacccatccggcggcccccgggaccccttgggggctcctgagaaattcctcgggaaaaacacccaaggctccagcagctggggtggggagggggggagcaacttccactcctgccccgccctgcgccccgccccgtctcgcccctcaccgcggccctccccgaagccctgtccatggtgctgatcgcggctctggggaccgcggggtgggggagggggcaacagggagggaggggaggagatgggcgctcgccaatttggggcagaggaggaaaagggagaatgaggtgaagccatttaaagagacgcaaaggaaactgtgggttcccgaagagcaccccccaatacttgtccccacccaccttcatcctcatgggcaattatttgcacccaaaaatcataactacacccctcatagcggcactcagagacacacaatcacacgcataaccactcacacggttaccctcgaaaatcagcacatagacaagagcacaagtgcatactcacctgtcgcaatacacaccgtcccagcactgccctgtcactcacagtcacactatcaccatcaacctccacacgcaagcacatacgcaacttcactccaaatgcacacacatgctacacacacatacacacatgcacacacctgcacattgcatgcattcccacgcgctcgccagaaaacgcactcacacatccccacccccaccccgagctgtcacacccacaaatcacccagagtcagatactcatgcgcccacatcacaccggggccgcacgcggcgcccacgcccttcccctccacgcccctccacccccctccacccctcgctcttttagagcctctctgagtcgtggaccctgggtcccatctcttccctcccggctcaccggcctgcgtccccggcagaagctgcagcgcggccaggagcaggcagagaccggcccgcggctggcccaggtcccggcggttccccatcccggcggggcccacgggcaaggcggggaaccagtcggggcggctgcggggcgcggcgacttctcgggctcggtgcagtcactcgcggcggccgctcctctcagggtccgcgggaaactgcccgagaccccgccctggcctcgccctgcgctccagcgcctggccaggcggggctttttggagggggagcgctgacagctggactgggaagttgggaaactttgtgctgagggctgattggctggctggggtggagcccagcgccaggagctgggttgttcctgccccaccccactgtggaggagaagggtcactcccacccagccctagagttcgagggttccagtcttaccccaaaccttttccgcctagcagatcccctcaaaggagaccttaacctcattcaagacttcagcctccatccaggccctagaattaggaggaggtgcagctttataccaaatcttttttattttctattatttttacattttattttggagacagggtcttgatctgtcacccaagctggagtgcagtggtgcaatcatagctcactgcagcctccaactcctgcgttcaagccatccacctgcctcagcctcctgagaagcaggtaccacaggcacacactgccacacccagctaattttaaaatatgtatattttgtagagaccgggatcttgctatgctgcccaggccggtcttgaacttctggtctcaagcgatcctccggccttgccctcccaaagcgctggagttacaggcatgagccaccgcccctggcaccaagtcctttctgcctcactcaggcccccaactggggtcccaacctcaccccgaactctcactcacctacctgctttatcctcagtccctcagctgcacaataggaggtaccagcctcagccccaaagcctttccttcaagtccctaacgggtcctcatcccacctcaaatctcaccccagatcccaaaatggggtccccagccttactccaaaccttcatctgtccactcaaatccctaagtcacgtgtcctggtcccaaattctcaccacagatcccaaaacacagttttcactttccccaaattcttgattcctcaaataaagggtctcatctccatccctaaccctcatctccccccgccccaactcaggtctccagtggatgccccggcctcaatcccaaatccccaccaaatgagggagtctgagctgggtgcggtggctcatgcctgtaatcccagcattttgagaggctggggcgggcagatcgcttgagtccaggagttagagatcagctggccaacatggcgaaaccccatctctactaaaaatacaaaaattagccaggcattgtgactggcgcctgtagtcccagctacttgggaggctgaggtgggaggatcacttgaacacgggaggtggaggttgcagtgagctgaggttgtgccactgcgatccagcctggacaacagagcaagactctgtctgtctcaaaaaaaaaggccggcgcgttggtgggaggtggtgggaatctgtccctgtcgcaaagcaacgcacagccactggggaggaaggggtggattcttgccattcttgggatgaggcagaggcccccctcaccgtgctgggacccccacctccagcatgaagaggcccccatgaggtcaaatagagcttttatgcaattggacaagcgcagacacgcaggatgtgagggtgtttccccagggaggggaggaaccaagaggcgtattctgagccctgaactgctccccgaaccctgcttcccccacctccgccccaggggaagagggagacgcaagcagtgcctccctcccagcctctgactccccagacaaagagtctctgtgtccctgaagaggaggggttggggccccatcaagcctgagggggagatgggggccccccagggtgggaggaggagagggtatctctgtaagctgtgcctcctcccaccccagggacatctgaggctgagacttctccaactaaaagactctcacaaaattcctgccctgccctgccttgctggaagttcttcctatagtctaactacatcttctgacagttctacaccccttccctctatgaaacacttctggatccacattctctgtctccttctctcactctctcccttcaatcagagattcttcacccagaatacagacactaattccccccaactttcacagaaactctccccagccctaaataatttatactcggccaggctcagtggctcatgcttgtaatcccaacactttgggaggctgaggcggctggaccacttgaggtcaggagttcaagaccagcctggccaacatggcgaaacctcatctctactaaaaatacaaaaattagctgggtgtggtggcacacgcctgtaatcccagctactcaggaggctgaggcaggagaatcattttaccctggaaagctgaggttgtagtgagccgaaattgcaccactgcactccagcctgggtgacaagagcaagactctgtctcaaaataataataataatttacagtcataataaaaattataaattaagaaaacagttacaaatggccaaggcaggaggatcacttgaggccaagagttcgagaccaatctgggcaacatagcaagatcccatgtctaaaagaaaaagaaatttaaaaattagctgggcatggtagtgtgcgccggtagccccagctactctggaggctgagataggaggatcgcttgaggctgtggtgagctatgatggtgccactgcactccagcctgagtgacagagcaagatgctgtctcttaaaaacaaacaaacaaaaaccagtgatgtctatagtaggtgcggagaagaaatgtttggcagatgaagaaaatgaggtgcagagaggatttaagagattctctcttactgcctgttcagggtcagtccagaattgagggtctccgggggagggcagaggctttgccctgcaggggatctgtgggagggggttaggagggagcagatgagcccaggatgaatggtcagagtcaggtgctgcccggcggaggtcacgagtccagggaggggatcaacatggccgctgcaccccggactgtgttgatctccggctgctcatcaggaattggtctggaacttgcagtgcaactggcccatgaccccaagaagcgctaccagggtaagaagtgcagggtggcactaggaggcagccgggtggaaacggcttccccagcactgtctcccctacccatccctcccagctgcacttgtgggcttggggagacccaggattccctccaggaatcatcccctcatcctagaaatatttcttgagcatcttctgggtgctctgaatgctggcaacacaactggagatgaaatagacaaaaatctcagccctcaggacgggtgtcatgtggggaggagagggagaatgggtgataaacagataaaaagaaattgttgctctatctggtgggaataagtgctgagacacaaaataaagcatgctgagagtggcagggggtgggtgggggttatttttagaagggtttcactagggcatttcctagattggaataatcactaccctgatgctcactcttccacgtctccccagattattgcttttactgagataagcttcttaagtgctcctgaccttgggggttgaagggatggccttctagttctaagaacttgcccttctgcacctctagaataaatccctgggacctgcatcctaaccaaccaggagaacccctgacccagagggagcatgctggagtcaaagtgggcaaagggttgttacttacaaagaggcgactgggggtgagggcattgccccagttggcagggctgcttctcccagccctctgccctctgttttagagacgcacacagctttgagcatgacagcctgaatgccagtgtgcagggaataacgtgtgtccctatgggcgggcagatgggtgtatgaaactgctggaggctaatgtttatggagcttttacaatgcaccaagctgcattctaagtgccctgaatccaggaagtcatttaatcctcacatcacacccgtgaggcaggcacaatcattcaccccattttattattattttattatttatttattttgagtcagagtcttgctctgtcacccaggctgagtgcagtggtgcatcttggctcactgcagcctccacttcccacgttcaagtgattttcatgccttgacctcccgagtttctgggattaaggcatgcaccaccacacccggctaagtttttgtatttttaatagacaaggtttcaccatgttggccagaccggtctcgaactcctggtctcaggtgatctgcctgcctgggcctcccaaagtgctgggattacaggcatgagccaccgtgcctggcctgccctattttagaaatgaggaaactaaggtgcagactgtgaaaggtctttgctcaaggtctcccagctgcaaagtagcagagctgggatttgaactcaggcagcccatcccttgcacccatgtttcccactatatcacatgtagatgcaagtgaccccattcacgtgcctgctacccacaaatcacactgacccgaagacaagaggcaaatgcccccaggagtgttcatgggtgattatgggtgcacacattgggggatatcaaacacgtatgctggtgcatgtgcagacatagtacatatgctgaggtcctgcttaagaacataagcttgaggctgggcacagtggctcatgcctgtaatctcagcactttgggaggcctaggtggacagatcacctgagatcaggagtttgagaccagcctggccaacatggtgaaaccccgtctctactaaaaatacaaaaaattagccaggcgtggtggtggatgcctgtagtcccagctattcgggaggctgaggcagaagaatggcgtgaacctgtggggtggagcttgcagtgagtcgagatcatgccactgcactccagcctaagcgacagagcatgactctgtctcaataaataaataaataaatatacaaaaattagccaggcatggtggcagtgcctataatcccagctacttgagaggctaaggcaggagaattgcttgaaccgggagacagaggttgcagtgagctgagatttcaccactgtattccagcctgggcaccaagagcgagactccgtctcaaaaaaaaaaaaaagggcataaaagcttggccaggtgctgtggctctctggctcctcacgcctgtaatcccagcactttgggaggatgaggtgggcagatcacctgaggttcgagaccaggctgaccaatatggtgaaaccccgtctctactaaaaatacaaaagattagccaggtgtggtggcaggcacctgtacccctgtaatcccagctactcgggaggctgaggcaggggaattgcttgaacccaggaggtggaggttgcagtgagccgagattgcacccctgtactccagactgggcaacaaacaagagtgaaacttcgtctcaaaaaaaaaatatatatatatatatggctattcacttcagtgttcatatatgcacatatgttggctatagttgtgtatgcatttttttcatggcaatctgttttatgtttatatattttattgtcttacctactaggctataaattccatgaaggcagaaactttatcttatttatttatttatttatttatttatttatttatttattttgagacagtctcgctctgttgccaggctggagtgcagtggcgctatctcggctcactgcaagctccgcctcccgggttcacgccattctcctgcctcagcctcccaagtagctgggactacaggcgcctgccaccacgccaggctaatttttttttttttttgtatttttagtagagacggggtttcaccatgttagccaggatggtctcgatctcctgacctcgtgatctgcccacctcggcctcccaaagtgctgggattacaggcgtgagccaccgcgccaggccgcccggccttattttttattttttgagacagggtctcactctctcacccagacggtagtgcagtggctccatctcggctcactgcagcctcaacctcctgggctcaagcaatcctcccaccacagcctcccaagtagccaggactacaggtgggggccacccaccacacctggcaaatttgtaaaatataatttttttgtagagatgggatctcgctatacttcccaggctggtctcaaactcctggggtcaagcaatcctcccacctcagcttcccaacgtgctgggattacaggcttgagccaccacacctggtgactttatcttatttcatgccatagcctcagcacctagaatagggcatagtgtatagtagatgctcaataaatgtctgttgaactcatggttggaaggatggatataggtacgtggagatgcgtgtacacaagtgtgcacttgttggctgagtgataaatgtaggtgtgtaaacttgtgagtttccatctctctgtgacttgtaacgcaagatcacagacacgtggcgcccacaccaaggggaaaggagctcagtgcctgtccctgctttactctctgccccgcagtcgtggccaccatgagggacctggggaagaaggagacactggaggcagctgctggggaggctctggggcagaccctcaccgtggcccagctggacgtgtgcagtgatgagtcggtggcccagtgtctcagctgtatccagggagaagtggacgtgctgggtgagacttcacagcccctgattcactaagccccatcctggtctgagtatagaccctcaatatggcaaggtctgagcaccagctctctggcttcttcagcaatctctgaacctgggcagaaggggtagaccagttggccaagaggggtagaccagttggtcctaccaattgatttattaagggctgggtgcagtggctcatacctgtaatcctagcactttgggaggccgagacaggaggattgaccagcctcagcaaaatagtgagactctgactctacaaaaaaattaaaaattagccagtcatagtggtgcatgcctaatcccagctactcgggaggccaaggtgggaggatcccttgagcccaggagtttgaggctgcagtgagttatgacagagccagtctggggagacagagtaagaccttgtctcaaaaataattttttttttgagacggagtcttgctctgcgcccaggctggagtgcagtggcgtgatctcggctcactgcaacctccacctcccaggttcaagcaattctcctgcctcgcctcctgagtagctgggattacaggtgcctgccaccatgcccagctaatttttgtatttttcttagagacgaggtttcaccgtgttggtcaggctggtctcaaactcctgacctcaagtgatccgcccacctcgacctcccagagtgctggaattacaggcatgcaccaccacacctggccaaaaatcaattttttttgagatggaatttcactcttgttgcctaggctagagtgcaatggcgcaatctcagctcactgcaacctccacctcctgggttcaagtgattctcctgcctcagcctcccaagtagctgggattacaggcaggcgccaccacacttggctaattttgtatttttagtagagacggggtttctccatgttcatcaggctggtctcgaagcctgacctcaggtgatccactcaccttggcctcccgaagtgctgagattacaggcatgagccaccatgcccagctcaaaaatcaatttttttaaaaaacaaaaatattagagacactagtaacaatctgaggcctggaggtggggcagattttatggaatagaaattctcatatatggagaaagccatatgtggttgggaaaattacttggatgagtcacttggggaagacagcatgatacagaaataagtcataaggtccctaaccttcgcaggaaggtgggtgtcgctgtcttgatgtaatttggggtcagaattgaattgctcatggattaaggggggcactattcccagcagcccttcctcccactcagggctgaggatcccctatgacaaatgctaaactgtgtttaaaggttaccaaggtttcatatttgtccacccaagataccctggactggccttggacttggagtacggggtgaggtgcttcagggagtgtctagaagtaatgctagaagagtgagggactttaaggtaacccttagtacctcttctcttagtgaataatgctggaatgggcctggtggggcccctggaggggctcagccttgctgccatgcagaatgtctttgacaccaactttttcggagctgtccgtctcgtcaaagctgtgcttccaggcatgaagaggaggcggcagggccacatcgtggtgatcagcagtgtcatgggcctgcagggtgagctgtggggacccaaccctggaaatcccaccagtgtctgatcctccccagactgggaggatggcgaatgggttttagatcatattctaaattagcatggaccctgggcacggtgattcatgcctgtaatcttagcactttgggaggctgagacgggtggattgcctgagctcaggagtttgagaccagcctgggcaacatggtgaaagcccgttcctactaaaatacaaaacaatcagccaggcatggtggcatgtgcctgtaatcccagctactcaggaggctgaggcacgagaattccttgaacctgggaggtgtaggttgcagtgagccaagatcgtgccactgcactccagcctaggcaacaaagtgaaactctgtctcaaaaaaaataataataaaataaaataaattagcctggagaattgtgttcagaaggattctgaagttcagaaggaaaaagtggccagacatggtgactcacgtctataatcccagcactttgcgtggcctaggcaggagggctgtttgagctcaggagtttgagaccagcctggtcaacacagggagtcctcatcactactaaaaatttttttagaattgggccaggcacggtgactcatgcctgtaatcccaacactttgggaggccgaggcaggtggattacccaagatcaggagttcaagaccagcctggccaacattatgaaatcccatctctactaaaaatacaaaaaaattagccgtgtgtggtggcacacacctgtagtcccagctactcggggtgctgaagcaggagaattgcttgagcccaggaggcagaggttgcaatgagctgagattgcgccattgcactccagcctgggcaacaagagcaagactctgtctaaaaaaaataaataaataagtaaacaaacaaacaaacaaaaaacaacaacaaaactttggccagatgtggtggttcatgcctgtaatcccagcactttgggaggctgaggctgatggatcacttgaggtcaggagttggagaccagaatggccaacatggtgaaactccgtctctagtaaaaatacaaaaattagctgggtgtggtggtgtgcacctgtagtcccagctactcaggaggctgaggcaggagattcacttgatctcaggaggcagaggctgcactccagcctgaacgacagagtgagactccgtctcccccccgccaaaaaaaaattaaattaaataaaaaaatcagccaagcatcctagtgtgtgcctgtagtcccagttactcaggaagctgaagtgggaggatcgcttaagctcaggagttcaaggctgcagtgagccatgattgcaccactgcaccccagactgcagaacagagcaacaccttatcaaaaaagaaaaagaaaaagagagagagagagaaggaaggaaggagggagggagggagggaggaaggaaggaagggagggaggaagagagacaagggccctaatgaagagaaaaatgaaggggatccccaagcggccccaaaggtttagagaatggagggaaataggggagtttcctgggaccaggtggagctgggaggaggtggcacccggcacccgagaacaacctctttctgaccccatatgaccccatcacacaatgccatacacccatcatcttggcaccatgtatctgctttctctggttcccacatcctctttgctctgtctcccaaagaccccatcaccctggaacccacaaagcccacctcccagaccctcaaagagctctcctccctctgaccctcacaggtgtcatcttcaacgatgtctatgcagcttccaagttcgccctggagggattcttcgaaagcctcgctatccagctgctgcagttcaacatcttgtgaggcgggcacgtgggcagagggggcttggagccagtgatggggaggtggcatcgaaagggggagaggagagatgaagacaatgaagctgagtgcagtggctcacacctgtaagtccagcgttttgagaggctgaaatgggaggatcgcttgaggtcaggcatttgagaccagcctgggcaacatagcgagacccccatctcagcccaaaatttaaaaattagccaagggtggtggtgtgtgtacctgcagtcccagctactcaggaggctgaggcggaggattgtttgaacccaggagttggaggctgcagacagctatgatcatgccactgcactccagcctgggcaacagagtgagaccctgtatcttaaaaaaaaaaaaaaatggacaaaataggtcagggagtggttggggcatcagacttacactacccatgcctggtcgccagcatctccctggtggagccaggccccgtggtcaccgagtttgaggggaagcttctggcgcaggtttctatggctgagttcccaggcactgaccctgagaccctgcactacttccgggacctctatctcccagcctccaggaagctgttttgctccgtgggacagaacccacaggacgtggttcaggtgagtgaagggcccagagccccaagacgtggctcaggtatgttgcggggtgaggccctccctgggtcccagcgctcagggcctccattctgcaggccattgtcaacgtcatcagctcgactcgaccacccctgcgccgacagaccaacatccgctactcgccgctgaccacgctcaaaaccgtggattcctctggcagcctgtatgtgcgaacgacccaccgcctcctcttccgctgtccacgcctcctcaaccttggccttcaatgtctgtcctgcggctgcctcccaacgcgggtgcggccaagatgagcagaacagagcttcacgatccccatccctgaacaaccagacctcttcattccacatctaattcaaaggatgaacagactcttcatttattcattctgcaaactccccctcccctcctctgtgcctagacatggctagaatcccagaagggcctttattttcaggcatagactcctctgtggtcacagctggagcacagagagggaccctgggaacttggcctgggaagcccagagcaggaagccacagctgtctctgggaaagcaagggaggcttcctggaggaagcggcattgttatgagccttgaaggaagagacagactctgctacattcaacctcgtgacttcatgatcctgggcctgagaacacaggaatgattcatagcccaccccccacctccatgcatacaccagagctctgtggaccaaggggtcattcctggtcacacactccatcagcaaaatgtatttgagcacacaccagcaatgtatgtatattttttccattaaatatatatttataaccacaagttgtagttacatttactatttaataaagctcaatttcttaaaattaaataaaaacttaaaaagccagttgaactactggctccaaagagagagagagagaaagcaagcaagcaagccagacatggtgcctcatgcctgtaatcccagcacttgggaggccgaggcaagtggatcacttgagtccaggagtttgagatcagtctggccaacatagagaaacactctgtctactaaaaatacaaaaattagctgtgcgtggtggcaggcgcctgtaatcccagctactcaggaagctgaggcatgagaatcacttgaacccaggaggtggagtttgcaatgaggccaagacggcgccactgcactccagcctgggcaacagaatgagactttgtctcaaaaaaatacaaaaacaaaaactcatgaatggataaacagacttttgtatattctttttttttttctttgagatggagtctcgctctgtcgcccaggctggagtacagtggcgcgatctcggctcactgcaagctctgcctcccgggttcatgccattttcctgcctcagcctcccaggtagctggaactacaggcgcccgccaccacacccggctaattttttgtatttttagtagagatggagtttcaccatgttagccagcatggtcttgatctcctgaccttgtgatctgtccacctcggcctcgcaaagtgctgggattacaggcgtgagccaccgcgcccggccaacttttgtatattcttaaagaggaaggaaattctgatacgtgggtaaatactgagaataccatactgagtgaaataaaccagatagaaaattccacttatctgagatgcctaaggtagtcaaattcatagagatagaaagtcactcagtgggcgccaggggctgagggaggacagaatggggaattagtgtttcatggggacagagtttcagtttgggaagatgagaaagttctggagatggatagcggtgatggttgcacaacagtgtgaatgaacctaaggccactgatctgtacagttataaatggttaaaatggtaatttttttttttttttgagacagagtctcgctgtcacccaggctagagtgcagtggcacaatctcagctcactgcaacctctgcctcctgggttctagcaattctcctgcgtcaccctcctgagtagctgggattacaggcgcccaccaccacgcctagctaatttttgtatttttagtggagatgggttttttccatgttggccaggctgatctcaaactcttgacctcagatgaccctcccgccttggccccccaaagtgctgggattacaggcataagccactgcgcccagccaaaaatggtaaattttgtagtgcacatattttaccacaactttgaaaacagacatagagtgttttagtttaaaaaaaaacttaatatagaccaggcacagtggctcacatctgtaattccagcactttgggaggccaaggcaggtggatcacctgaagtcaggagtttgagaccatcctggccaacatggaaaaaccccatctctactaaaaatacaaaaattagctaggcattgtggtgcgcgcctgtaatcccagctactccagaggctgaggcatgataattgcctgaacccaggaggcagaggttgtggtcagctgagattgcacctctgcactccagcctgggtgacagagtgagactctgtctcaaaacaaaaaccaaacaaacaaaaaaactgaatatatactttttaaaaaactttttcactaaaagcagcatactatacaaataaatgtgaactttagttgtttccttggatcatgtataccttggaggattttcttttttttcttttttgagacagggtctcactctctcccccaggctggagtgcagtggcgcaatctcggctcaccgcaacctctgcctcccgggttcaagtgattctcccacctcagcctcctgagtagctgggactacaggcgtgtgccaccacgcctggctaatttttgtatttttagtagagacagggtttcaccgtgttagccaggctggtctcaaactcctgactgattcgccctccttggcctcccaaagtgctgggattacaggcatgagccactgtgcctggtcgcagggttttccatatcggcccaagcagacatcctcattccttgcagatctggagtttattccattgtggagataaacaataatttatgcaactcttttctctactaatagatctctggattctctccaaatgtttgctattacataaatggcagcaatgacaaacctcatatcatctcacacatgtgcaagagtttctgtcatgagattatttggccaaagtatctaagcatttgtaatttttctgaacattatcaaattcttgtccatcctggaggaccaatgtccatatggtagcctccttgcttggcaatacctttggcacacaccatattatctgtcttctgaatttatgcaaatctaatggataaaaattggtatcttggtgtggttttaaattgtacttctcttattatgagagaagctgaatatcttttcaaatgttaaagaaccttttgtgtttcatttttagtgggcattctgatcacacctttgcccaatttattttctgttggattgttgatgtttttattattcatttctagaaactttatatattgaggaaattaaggaatctgatacgaagtgcagacacttccattcccagtttgcttttttttttcttttttaacttatctgttaagggtgtttggccttatttttatgttgtggaattgttattattactattatttgagatgaagtttcattcttgctgcccaggctggagtgcaacggtgcgatctcggctcagcacaacctcctcctcccgagttcaagtgattcccctgcctcagcctcccaagtagctgggattacaggcatgtgccaccacacccggctaatttttgtattttcagtagagatggggtttctccatgttggtcaggctggtctcaaactcccgacatcaggtgatccacctgcctcggcctcccaaagtcctgggattacaggcgtgagccaccataccgggccattattattattttacttttaaatttcaagacacagaaacaaagaacatactgatagcacagtggctcacgcatgtaatcccaacactgggaggtggaggcaagagaatcacttgagtccaggattttgagaccagcctgggcagcatagcaaaaccccatctctacaaaaaattttaaaaaattagcctggtgtggtgtcatgtccttgtagtctcagctactcaggaggttgaagcaagaggatctcttgcatccaggaattagaggctgcagtaagatatgatcgcaccactgcactccagcctgctgagagagacagtccctgtctcaaataaataaataaataaataaaataagaaaagacatacacagactgattctgttaaaacacaaagacaggccggatgcggtggctcacgcctgtaatcccagcactttgggaggccgaggcgggcggatcacgatgtcaggagatcgagaccatcctggttaacatggtgaaaccccatgtctactaaaagtacaaaaaattagccaggcatggtggtgggcgcctgtagtcccagctactcgggaggctgaggcaggagaatggcatgaacccgggaggcggagcttgcagtgagccgagaccacgccaatgcagcaagccgacattgcaccactgcactccagcctgggtgacagagtgagactccgtctcacaaaacacacacacacacacacatacacacacacacacacacaaagacaatgtcaatgctcttttcaaacctctgcagtggtttctcctcttatttagacttttttttttttgagacagggtcttgctctgtcattcagatcgaagtacagtggtgcaatcactcagcctcaacctgctaggctcaagagatcctcccacctcagcctcctgagtagctgggaccacaggtgcgtgccaccatgcctagctaactttttaaacattttttgtagaggggggtctcactatgttgcccaggctggtcttgaactcctggtctcaagcaatccttccaccttggcctctcaaagtgctgggattacaggtgtgagccatgatgtccggcatgcttcccctcttatttagactcagatcaaaactgcatcatctgaccaatgaatatttgtctcaaattatctcccactttttccccatcacctactcattccagcaacactgacttctttgctgtgccgtttcgtctgtctgtctgtctgtctttatctctttttagagacagggtctctctctgtcacccaggctggtgtgcagtggcatgatcatagttcactgcaacctcaaactcctggattcaagtgatccttcagccttggcctcctaaagtgctggtattactggtgtgagccaccacgcctggcctacttgctgtttcttaaactctccaacctcaatacctttgcacttgctgttccctctacatagaatgcttttcccaaatatccacaaggttcccttcctcatttccttcatgcgctcaaataccacctcctccaagaggtcctccaggctcacctcaagatagcacactgtccctttattttcttacgtgttttatttcccatgatctgacatggttctctctcttttttttttccttccttccttctttccttcctccctccctcccttcctcccttccttccttctctttctttcattctaaaaacaaataatcatagaaacgggggtcttgctttattgagcaggctgcttttgaattcctgggctcaagtgatcctcccacctcggcctctcaaagtgctgggattacagacatgagccaccacgcccggcaggcatataccactgtttcttgcttgtctccacccactaaaatgtcagctccatgggcaggggactgttgtctatttgctctacccacatcaccagcaccgtggaaaccaaaaaatgactcaaggagttaaccaagctggcacatcctggcagtacagtccaccctgagaagctcctgacacctcctacctggacaagacagggtacttctctgaccctcagtttcttcatctgtgaaatggaacttgccagggagaaagttatattaagggctggaatgtagtcggggtctaataaattagagcccttaatagttatgttgatggtagccttattccttggtctcctgggtcctgcccggccttccctgggaagctctgagctcaaagccctggaggagggagtaaaaccagaggctgcatctctgcaaggacacatccctgcaagtccacccctcccgcccgcgccttctcggtgcaaactcccgatcccagggaggggaaggcgggcggaatctgagcggcaggcgcagctgctccgggcgggcggccaaggttccctccctcgagcactggcattcctgagggaggggccgagcgcagctgcccgcctggccggaggctcgcttgcgccctctggtgtccaagtacgagaggccacgtggacttgcgcaccagcagccggtctgttctaggccactgtctgcagctcaggtggacctgggtggagctaggtctaccccctacctttcttgggctcccttttcttatccgggttcacgaactcagcttccatcactaaacttgctgtgtgaccctgagcaagacactcaacctccctgtaccacagtttcttagctgtgcaatttgggacaggatcctttacctttttagtgccactttttctttctttctttctttctttctttctttctttctttctttctttcttttctcctttttctttctttctctttcttctttctttttctttctttctttccttctttctctttcttttcattcgtttgttctttctcttcttttctttttctttttctcttctttctctctcttctttctctttctttctttctttctttctttctttttctgttatagagatggggtctcactgtgttgcccaggctggtctcaaactcctgggctcaagcaatcctcctgctttggcctcccaaaatgctgggattacaagagtaagccaccaccctggttgccttcgttttttctttttctttctttctttcttttttaatttttgggacacaatctcactcggtcgcccaggccagagtgcagtggcaggattactgttcactgtagccttgactcctgtgctcaagcgatcctcccacctcaaccccctgagtagttggtgttatgcatgcgtctaattgaagagacaccctgaacaggctaagtgtgagcaacaaggctgtttactcacttttcggctaagtccaaaaagggaatcagcaaagggtggttggagtggaactggttttataggtttggggtaggtagtggaaagttacagttaagggcagtttcttcgggcaggggaagaatgtcacaaggtgcatagtcacgaggtgggaggtcacaaggcacgatatcacaaggttgattgattagttagggcagggcaggagcagatcacaatggtggaatgtcacaaggttggttaataaattaaggcaggaactagctgtttcttctttagtggttctcctgttgctccaggcttcgtgactccagggggcctgtacgtgtggctcacagggatcacaatggctggaccatggtgtagcctgttcagaggaccttacattcctgtctttttatgtttaataatgaaaaataaaatgagaaagaaataaaacgagaaagagtagtgtaatgttgggatgttggggtgaaaattttcgggatggtatggaggggtgatggatgatgttttgggatgatgggtaatgtttctcaggactgcttcaagcggggttaggggcagcatgggaacctaaagttggagagattaaactgaagaaagatcttggtgtagggggtgatattgtgaggttttaggaggagtatttgccgtattgattgattagtaatagcttagatgcaattttgtataaactgagagattagcctgaaaagacaaggtccgatcaagaggaggagaaggatgaaagggcctgttagtggaaggagccttgaagctaggctagagaatggcaaggtaggtccagaataattatttgcctgatttgcaagtttttgagctttgtctttaaattttttgatgttatcatatacgaggccagattgatttaagtaaaagcagcattcttcatttaagaataggcagagtcctccttttccaacagtaagcagattgaggcctcggcgattgtggaggacaactgcacccaaggaatcgacctgggcttggagggcagagagtgtttgagttatatcgataaggctagcagagaagtcattggagagactgagaaaggtagtgatgttgtaaggcctgctactcctgtcccgattgaagcggcagagacttctagtcctacaaacggaattaatggaatgacttttttttgtcgtgctgaggttaagagaggaacgggcagctattcgctaccatttgcaaacttgattttggaagtaaggaaaactagagtacgggttcctgtctgattggcagggaggcacatgtaggtggaaaagccacagagaaaaaagagtccttgaggcatgcaaaactggaagtgcagagtaaaatggtgagagtgtgttttggaagtggggtcctgcacccagacccctagggatccagcaagggcagcagctgttaaaggttgtagtggggtttgatagggtagttgtgtagagggagaggttctgttttcatggaagggtaaaggaacataaggaagatgggaggctccctaagggaattccagtaggtaattgctgggagacgtataagggggcagcaatggggatagtttctgtgtagtgaggggtccaagaacagggggtgtggcattgatataggcagacagctttttttaggtaggtacagaggagagtggcagcttgttgttaaaacatgtcaggggaatttttactgaatttgtctagaaagtaaagaagttgttcgggagggcaaaggtggggggtcactgaaagaggttcggaggtgtagggagatgggggaggttgcccagtcagctggtagggcagggacagctgtgtagtaggaggaagagagggaaatgcatagccaacaatttttggccaaggaaggaacaggatggaggggaggacaatctgattaataaggcgaaggtcttggactagtctgtaggatttatctggcttttgaacaggtagggtgggagagttgtaagcggagttggtaggaactaagaggccatgctgtagtagacaggtaataacaggctttaggccccttaatgcctgttgtgggatggggtattggcattgagcaggataagggtggttaggttttaatgggatgataaggggtgaatggacagttgcaagggaaggagcggaagtatcctacactttaaggttgaggtggggagatgaaaggggaggttgccagggagggttggaattggataaaagggtagctatgagatgtggctgtagtccaggaatagtcagggaggcagataatttagttaaaataccttggcctgataaggggactgggcaggtggggataaccaggaaggaatgcctgaaagagtgttgcccgatttgacaccagagttggggacttttaaggggtttagaaacttggccgtcaatacccacaacagttatgggggcaagagaagcaggctcttgagaagaaggtaatgtggagtgggtagcccccatatcaatcaaagggacggacttaccctccaccgtaagagttgcccaaaactcggtgtccatgatggtccagggggcctccgagacgttcgggcagcgtcagtcttcagccgccaagccgaggagatctgcgaaggagttggtcagggagtttcgggtttgagctccaggagctccggcagtggcgataagagtccgacagtccgacttccagtgagggcccgcacagaccgggcatggcttggaaggaatgccgggctgcgggcattccttggcccatggccaggttttcaacccttgaagcaaggtcctggagcggggatttggacgtcttgaggttcttacacgtaggcggtgcagctggggtttgtcttagggcagaggcaagcctctgcagttctgaaatacgccgctgccaggcagcctcttccctgttattgaacaccttgaaagcgaggttgattaaatcctgttgtgggatttgagggccagactctaatttttgaaatttctttctaatgtcaggaactgactgcgtgataaaatgcatgttaagaataaggcggctgccgggcgcggtggctcacgcctgtaatcccagcactttgagatgccgaggcgggcggatcacgaggtcaggagatcgagaccatcttggctaacacggtgaaaccccgtctttaccaaaaatacaaaaaattagccaggcgtggtggcgggcgcctgtagtcccagctactggggaggctgaggcaggagaatggcgtgaacccgggaggcggagcttgcagtgagcggagatcaggccactgcactccagcctgggcgacagagcgagactccttctcaaaaaagaaaagaaaagaaaaaaaaagaataaggcggacttctggcccttcagggtctagtgctgtatatcgcctgagggtggcagctagatgggccataaactaagctggattttcatatttgttctgagtggtctcttttagtttgtcataactgatgactttatatgcagccttctgaagcccttgagctaggcaagagatcatatagtcccgcctggctatgccttggacccctgcgtggtaggtccactgggggtcttcacggggtacttccctggcacctttttggaggccaggctcaaggcaccagtggtcatcagcataagactgagctagggtccaaactcgctctcgctcctcaggagtgaacgtagaggtgaggatgacgtttaagtcattccagttaagattatagcactgggttaagtatcggaattcttgtatatagttcgtggggtcagacgggaaagagcttaggcgttgactattttgggagagttctgacagggagaaagggacatgaacctggactattccttcggctcctgccacctctcgaaggggaaattgctgggcaggggcagggggaccggccacggggccaaattgtaagccagataaggtgtgaggaggggtggtgatgggaggggcataagggggtgggctgtgggtagaagagggatcaggttctgagggggaattagaacgagttcgggtgggtgagggggagaaatatcagagggattaacagacacagaggaatcggcattgccaatggaaaaaggaggggtagacggaagggagataaggaaaacttgggacaggtcacattgggagcagacggtagggagagatcatagtgtaaaaaaatgcctggacatagggtacctcagaccattagaccattttgtgacagaagttgtctaagtcccgcaaaatagagaaattgaaagtgccgttttctggccactgagggctgttgtctaatttacactggggccaggcatgttacagaaaaaaataaataaacgtttaggctttagattgggtgaaagctgaagaggtttgagatttttgaggacaaaagtcagaggggaagaaggagggatggagggcgggaggttgcccatgatagaagagggaagattggatgggaaagaaagagacaaagaatagagcaaccacagggatcttcggtgggcatcccgaatggaagtcctgggttgtacggctgtgaccaacgctggatttcagaaacacagataaaaggaggttccttgtctgaaagaaaaagagagagagagacgaagagagactgaggcagcttaatcgatctgtaggcaggagtggggtcattttgcaggggtgggtctgaagtcccaaggtggaagggagtctcttcaaggaagagtgcaggggaatgggggtaggtgtcccggaggagatcctctatcccgggctttcagcaccaaatgttctgcgcgcgtctaattgaagaggcaccctgaacaggctaagtgtgagcaacaagactgtttattcactcggatgcaagcgggctgagtccgaaaaaagagtcagtgaagggtgattggagtggaactggttttataggtttggggtagggtagtggaaagttacagttaggggcagttttttcgggcaggggaagaatgtcacaaggtttatagccacaaggtggggggaggtcacaacgtcaattgattagttagggtagggcaggaacatatcacagtggtggaatgttccaaggtcggttaataagttaaggcaggaactagctgtttctttggtggttctcctgttgctccagcctttgtgaccccaggaggctgtacatgtggctcacaggggtcacaatggcttgaccttggcgtagtccgttcagaggaccttacggttgggattacagtcacacacaccactatacccagctaattttaaaaaaaacttttgtagagatagggttggctatgttgcccaggctggtctcgatttcctggtctcaagcgatcctcccggctctgcctccctaagcgctggaattccaggtgtcaacccgagtctggagagttttttcatctgtaaaatggaccagtgatgatccttcattcattagattgctaagagaatttaaacagacagtccaggtgaatgtggctacagtaaaaatatacactccaggctgggcatggtggctcacacctgtaatcccagggctttgggaggccaaggctggaggatcacttgagcccaggagttcaagaccagactgggtaacatagggagacccccgtctttaccaaaaatacaaaaaaattagctgggcatggtggtgcctgcctgtagtcctagctacttgagaggctgaggtgggaggatcacttgagtctaggaagtcaaggctgcagtgagctatgattgtgccactgcactctagcctggatgacagagggagactgtctctaaaaacaaaaaataaaaataaaaattttaaaaatggctcagatggttctacctggcaattcccactgtgtagatggagacactggtactgggagacagggctcagactggaggaaaagaagggaaggactgcggagacaggccctgatgccctttgcctttgggcagttgcctgtcccagactcctgcaatccctgcccccaagagagggaggatgtgaacacctggtgaaggggaacactcacccccagcccaggcagagctaaacagaaccagtggaggccaggcacgatggctcagacctgtaatcctggcactttgggaggccaaggtgggcggattacgtgaggtcaggagtttgagaccagcctggccaacatggtgaaacctcgtctctactaaaaatataaaaattagccggttgtgatggcctgcacctgtaacctcagctacttggggggctaagacaggagaatcacttgaacccaagattgtgccactgcactctagcctaggcaacagagtgagactctgggggaaaaaaaaaaaaaaacagaaccagtggagattcctgagaccctgggacagtaaatagacactaatgttctagaaccttccaaattaactataatttgcttccctgagccaggctttaatttgattctattgagtctttgctctctaaaacatcaacttaaaagcattagctgaagactcactgctcctcagctgcctgacatggggcaaattgtttagcctcttggggcctcaatctcctcatctttgcaatgggtgagaattacttcagcatagctgcaagatgacttcttcttttcttcttcttcttttgaggtagggttacccaggctggagtgcagtggtataatcacagctcactgcagccttgacctcctgggctcaagcaatcctcccacctcagcatcctgagtagctgggactacaggtgtgcactaccacacctggttttttgtttgtttgttcgttcgttttgtaggggcagagtctcactatgttgcctgggctggtctcgaacttctggcctcaaacaatcctcccgcctcagcttcctacagtgccaggattacaggcatgagctaccactcctggcccagctgcaagacttctatcaggggacatagagcacattgaacagtgtctggcacctagtaggtgcttgacaaatgcccaaggaataaataactagatcctactcctccctttgcttctaacatccttggtttcagctctctacaaaggcaggatctaggaaatgggcacacattaagccccaattcatgggagactatgagatttcagtagaaaatgcccttcgtaagtaagtttgcagtaaatgtccacaccacacaggaagggattttgtctgtcatgttcactgctgtgtccccagtatgctaagtaggggccagggtcaaagtaaatgcttgatgaatctttgccggataaatgtatattatctgctggatgcagtggctcatgcctgtaatcccagtactttgggaggcagaagtgggcggatcatgaggtcaggcgtttgagaccagcctggccaacatggtgaaactgcgtctctactaaaaatacaaaaaattagccggatgtggtggtgcacgcctgtaatcccagatactcaggaggctgtggcgggagatggcttgaacctgagaggcaaaggttgcagtgaaccaagatcgcaccactgcactacagcctgggcaacagagtgagatccatctttaaagaaaaagaaaattatattatcatttgatggggggatcagggacccttcaataggcaaaatttcccaagctggctgaattgacatcactgtagggtgcagattcaaacagactcatcatcaagcccaactgcttcttagaggcagacaccacaaagccgtctcaacattctctttaataagcctgctaaacattgagaattatttgaggacagagaaagcctttttccaggaatgcttcaagcatgatgtgtttccttccctggtttaatatgtataatttgccttctggaaaaggaacccagagactctggcatgacttaggaaacaatagacaatggtcacaatttactaagcataactgtctcctgcaaggatgacgaaatccatatagcgcaaggatttgaagcccaagaagaggactttgacctatggatttctcaggaggtttcgttatggtggatcctggagtcagatggtcaaatgccacatgctgctcactcccggaattgggaaatagggaaaaaatgccagcacctcccctgtttgtgcagctgccctgttttgccaatttcacaaaggcaaaagtagggaaaatccatccaggctagggtagaaagatgtttgctctcctcctgccagccaatcccaagcaagccctgagttcagtgtcctgggtgtgcaaagctccttgctggcggaggggaaggctttaggatatgaccttcatggccaggcacagtggctcatgcccgtaatcccagcactttgggaggttgaggcgggtggatcacttgaggtcaggagttcgagaccagcctggccaacgtggtgaaaccctgtctctattaaaaatacaaaaattagtatttttgtactaagtacaaaatgagcttgctggcccatgcgtgtaatccccgctacttgggagactgaggcatgagaattacttgaacgtgggagacagaggttacagtgagctgacattgtgccattgcactccagcctgggtgacagagccagactctgtctcagaaaaaaaggggagaggggcgtggataagaccctcatggctcatgggacaggcagttctcctaccactctggcccccaaggaagcggatggggcacttctcaagcatatcttggaggcttggctgggaagtaagaaacacccccaactccgccccattggatttatagggattcttgccccacacctgtttagatattaactcagccactacaagtcaaggcaaacaggccagggccagggcagacaagaggacagacaagaggacagacatctgcagcctgtggcctcctgtcaccctcccacccaccatggaaatgccctggcccctagggtggattctgcttcttttgggaagccccctcatccacgctgagcctctgtgagtctggggaatggagggggctcagccggcttcctgcacatctgatgtctgcgtgattccagcttatgactcgtgttcggtgtcattttccctactcaagtcccttaatgcccttgtgttagtctactggcaggtacatcctggtgaccccccgagttctgagggttggcagtccggagagcattcacattcaggcccactcagactccagacagcccctcacaaggaccctcaaggtgaacctcacagtgtgggacttccccatgaggaagacagtgttggcaaggagccagctcattctctcaccaggaaacaactttatggaccaggcacctgtgacggtgggtgacaggctggaatgtgtgaccccaaagggaggctacaggtcagcaataaaggtagaaaggggcagactttctgtccagagagtagataaagggcccaaagtacttaccactcctctaatatcctgtgcatttagaagccaaaagtccctaagcctgggctccaggaagcctccactagcccatttgatgcctctctgagaactataaaaggtgccttctgttggtagcttgggaagatgagcatggacttgatttcgtccttcctttggctgggtgctcttgtgcagtgagcaacctacacaactgcacatggcaacctagctcccaaaggcagagtcagaagaccctcagtcaattgctcctcccaggatctgtcccagggctttacccccagccagggagaccccagcagagcctgaggagtatggatatatatctctctcaggttcccgagagcctgatgtacctcccaaaaccagggcagcaatatgtcatcatccgggcaacttgggcacccacctcgggctcctcattcatggagaagatggtgctggtggctcttcatgctggctacatctttatccagacggagaagaccatctacacccctgagtacttgggtacagccccgaggcacttggctcggggcaatcactggctctcatcccgtctctcccaatgtctgagatactcccatcccctaaaatcttctccacctcccaagatctctctctatgcataagtgccccccaccccgccactgcccaagatgcaaactctctctctctctttcccttcctctacccaatactcagagtcctccttctcccctagttcactaccgggtgttcactgtgaaccacaagatggaccctgtgaccaggacattcactctggacatcaaggtggtctttcccgatgaggggtggggggtggtggtggatcctggacactggggttacatggtgtgctgaagtcctgggggcatgagccaccagggccctcccagagggcagtcaccagccccaccccctatccccacagaacccaaagggaatcaccgtgattagccagagtctgatggccaaggatggcttctttttcagctcctttcacctcccagagcttgtcaggtgcccttgtcaggtctgggagcccgaggggtggcaaaggaggctgtcattctctgtctccatctctcttaactttctgtgcctcagtttggggacctggaccatcgaagccagctaccaaagtacacccaagcagaagttcgaggctgcctttgatgtgaaggaatatggtgagaaaggtgtgggtggggtgagcaagatgaatacgccagggacaggacttggaatagaaaggaggtctcaaggggaacctctgctgtaacccagggcctgagctggatgctaagtgttgggtgctggtgttgcagcccttcgggcttgacagagccaccaaggaaggagcaggactgggaggggacgagggagcaggtagaatactgagggtgaccatggcttttttttttctcccagtcctcccatcttttgaggtccagctggtcccaaataagactttcttttacctcaaggatgaggctctgggcgttgacatccaggctcggtgagcccccttcctcccagctctgccagaagaccagggacacaaagattgagtacagagaaacaagcaccaggtgctatggctcacatctgtaatcccagtgctttgggagaccaaggcaggaggatcacttgaggccaggagttctagaccagcctggacaacatggcaaaaccccttctctaccaaaaaaaaaaaaaaaattagccaagctggctgggcatggtggctcacacctgtaatcccagcactttgggaggttgaggtgggtggatcgcctgaggtcaggagttcaagaccagcctggccaacatggcaaaaccctgtctctactaaaaagacaaaaatagccaggcatgttggtgcatgcctgtagtcccaggtactcagggactactgaggtgggagaatcgcttgaacccaggaggcggaggttgcagtgagccgagattgtgtcactgcactctagcctgggtgacagagtgagactctgtctcaaaaaaaaaaaaaaatagccaggagtggtggcacatgcctgttgtcccagttactaggaaggctgaggtgggaggatcgcttgaacccaggaggtagaggttgcagtgagccaagattgtgccactgcactgcagcctgggtgacagagtgagaccccatctcaaaaaagagaaagagagaagcaagccacttctgtagcatttagggtggtagacatactcttctcccacccatgagatattctgggctacctatgttgtcctgtgaggttgtacagaccatgtctgccacctgtgaggttgtataaaccatttcttcaagtctatgaagttgtacaggccaccttgtctacccagtggtgttgtactgcatctcatctcatctgccacttcacagtttagaccatctctgaaagtctatgaggtagtacaggttatgtttgccatcatgagattgtccagaccatctctgcagctctatgtgatggtaaatgacacatttgctgccttgtgttttacagaccatctgcattgctatgaggttgtgcaggcaatgctgtccacctgagattgtatgggctatgtctgccacttctggacattatatgaatcattcctgcagctctaacatgctacacaggccacctagtttccctggtgaggctgcacaggccacttcataggttgcccagacttctttgtggctttatatagtttgaagtccacctccaccatcttgagagattgcctagaccacatctgcaacccatcaaggctttatgggatatattcgtcacctcccagagttgtgtgggtcatcaatgaaaccatctaagtttccaagggccacctctgcccctcccaattttgcacagccatctctgaagcagcatgaggtatgtgggtgcttcagagacagtggaattgtcctccatcccccacgtatatatttaacaagccagtggacggacatgctttggtcatctttggggtgaaattggactcctgccggatccctatccaaagctccctgcagagggtggaggtgactgaatcccagctcctccccaacctccaatccactccactctctaacgctccccaaaaaaccatatcctctcctctatcttaccctaagaacagatctctgaaggcctgggccacgtctccctccagaaggacacgctcatggccgcattccaaggcccaggagaggacttcattggaggctcaatctttgtcaatgtcaccatgttctcctcaggtgccaccctcaccccggcccctgactgaggtcaggacatggtgttcttgcccaatgcagacactccacccatgtgaccttgggccacctcccagcctcagtttcctcattagagaaatgggtggaaggagctgaaatagtgttattgtcgttctctgccttcaccaagatggggctctcatactagtcctgccactcacttaagaaattgaactccctcacaaactctgtgttctcactgtctctacagggggtgagatggtgcaagctgagacctcaggggtgaagatcatccagagcccatacaacatcaagttcaccaggacaccccagtatttcaagccaggaatgcccttccactttcgggtcagagtctggactcactacacccagggactcagggccccctccccaaagcagacttcccacaaagagacaaaaacccacactggactcacctgcatccaactcatctgaaggttgagtctatcatgttccccagactaatcccagagtccccccaaaccttaaccctaaagcacagtgatggctccagaatttctctgtggggacttagaggccacaatcaggctggaagttggtgtttgaaagtttatctagaggctgcatttgcacatcaaagcatggccttttcacatatattaatttggatgggcattaggaaagtcagggatatcctttggcaccaatcctactccaagtctcctataggctctcatgtgtcctccttccctctccactctcagtcttcccactcaccatcagctctgcaacacccaggataaccacatgtggttgtacactgcaaagctctaggaggtgccattcataaaaactccaatatgaatggtgcccccggtgttgtttagtgcaccatgtataaagttgtacaaagcagtcctattcagatcatattccagtctcacctctcacaccaggccactgcaggcttttccttcaccttaccccagattccacctcaggtcttcatctcaaatcctgatgggtccccagcttccagagtccttgtccactcccaagaccaaaaagtgtacacctcagctgaggggttggccactctgaccatcaacacagatgcaaatctggacaagctccccatcgaggtaccaacttgacaaggcaaggagggtgggattagagctgtgtgagttggaagggttggggtttacttgcccatcatcctccctaggtgaaaactgaggaatctcttcagccagaggagcaggcttcagccaagatgacagcttggccttacttgactcaggatgggtcaggaaacttcctacacatcgaagtaaagacattgggcacagaggttggcagcagcatccagctgagcctcaacacaaggcatcaggaccctaaaaccaaggacaagattactcacttcaccatcctggtgaggagctaggaccagggtctgagtcaaggaattctttccttggaaaaaccttggcttgctgagttggagaaactatgaaaaaagatgtgaaggtggcaacaatcttgagtgggctcagatctagaggctgaagaaaagagactatgagcctccattgtgggatgggacagattcagagaaagactggccctcccttctcatccttgacctcccttgtcttcaaggtcctgagtaagggccagaccgtgagtgccaaacatcagtcaaaaagccaggggagtgtctacacatcagccattattgatgtgacttcagcgatgctgccctccttccgcattctggccttttatttacttcccagaggagcaagccaagaccctgagttggtggctgattccatatggattgatgtgaatgacagatgcatagggatggtaagccaaactccttgtagttgtgcatcaccatcataaagccccagaaaggggctgtacaagtttaggcattcccaaactagaagccagggaagagaaggagaatatgtggccttaagagctcaacacaaggtgtggcggtgatgcaagtaaataaatatacggagttgggattagcctagtggagttcccagatgctccaccagagcagtagggaacgtaagcctgaaagtgtagttgtgtggtctatgattccctttttctgacatctctctttttcttggctcagctgaaagttggcttgaagaatgatagattcttccagtctttggagcccaacagccaagtcgaactgaaggtgacaggtgatgcagaagccacagtggggctggtggctgtggacaaggctgtctatgtcttgaacagcaaacacaagctcactcagaagaaggtaagagcatgtgggctttgggccaagatgttgccaggatattctagctggagcctcagcttcttcagccataaagaggacaacatcaatgtaaggattcaaggagatggtgcaaagtctaatgactgaaaggtgataagagctcaaaaaatgggagatagtatgagaattatgatttgagcctgcaattccagtacaccatttctcctttcatggaggagtcatacaggtcccaaatccaggttcctgtcttgacctctaggtctggaatgtggtggaggaacatgacattggctgcacaggaggaagtgggaaagacagatttgctgtgttcaaggatgctggattggacctgaaaatcagcacaggaatggatagcctggcaagctcaggcacaggctttgggggttggggcaagaggagggcagaaatgggtgcagtgctgcctacttggttttagtgtcaaacagatatgggctgtaatccacatcctgtcacttaccatgggccagtcacatttctctctgagtcttgatttctttgtccataaaatagagataataatagaagtaactcacagtgtgttggttaagacagggttagccatgtgtatcaaatatacaaataacagtaggtcaaacaggtagtttatttctcattcagtaacactacagaggtcatcctgggactcggactccttctaggagtccatccatgccaggcagcaagatgaagggaagtggaaaggggaggacacttcttccacatctcattggccagaatatagtcacatggccccacctaagtgcaagagaggctgggaaatgtagtctttattctgtgtgatctatacaatatggaggcttacttgtcacagatgagggatgataatggatttggagacaactaagagtgtattctctcagctataaattgtaatattaataatagttcttatttattacatgccaggtccagtgctaagtatttgtatatgcattatctcattgatagaactatgattatgcccattttacgtcactggggaaattaacacccagagaggttaagtgacttattgaaaatcgcccagcttttaagtgacaagtcttgaatataggaggctgtcagatgaaatgaagtgatgcatataaagtgctggacatacagcaaacacccaataaacatcatcaaggatattgataatgatcttggcggttgttctatcatcattccctctgacccccagactagccctgcccccaggaccctcctcccagccgccatcgccgctccctgaagaggctggagacaaaaaggaatgcaggtcagtgttaaagctgtatgtctccctccatctccccaacttaaggtatccatcagggcttagaacaggacaccaaaaccactcaatgtatttccagcagggagggatctaatagggggagtttggtgcttacaaaatcattagatgggcttttggggtggaagttggaaggctgcttgctgggactcaagatcacccacttcagtcttgcaatccatgaaatatcaggaaactgctgccaatatctctcaaagggctggtaggttgataatcaaacacgaaatcatgcccattacaaaaacacacatagactagagcccacccatcagctaccactgctgcaggaaaaatggtttctgcttctcttctatctcccagatctctcataaaagcatctcagtggctgcatctaatcccattcagaaccctagcagcaagggagtctgggaaatgtagttttcagatgtctagcctctgtggttcaggatggaatgtagacaaaaggagagataggtcttgagtgtcattggacaatatctgactaaactgccatcctgaaggctagaatgtggaccagaagaaaaggctttgagcctggagtcagaggaagatgggaggcagcaccaggtgttagaagcatggattctgaggctggcatggtggctcatgcctgtaaacccagcactttgggaggccaaggcaggtggatcatttgaggtcaggagttcaagaccagcctggccaacatggtgaaaccttgtctctactaaaaatacaaacattagctggctgtggtggtgggaacctgtaatcccagctacatgggaggctgaggcatgagaatcgcttgaacctgagaggcagaggttgcagtgagccaagattgcgccactgcactccagcctgggtgacagcatgagactccatctcaaaaaaaaaaaaatgcagtatggattctggttccacctctgccacttgggagccttgactctaagcaaatgaattcacgtctctgtggctcagcttccttgtcagaatctcaccatgtgagttcaatatgaggcttcagaaagggcacagataaggcactaggcatagaatctaccacagagtaattgctaaatagtggcaaggtgtgcatagcatcaaggtgaatgggtcccagcttcttaggtcctgcccaaccctcctctttccctctgactctggcccacagtgaacaagtttaagacagagctggagcaaaagtgctgtgaggctgggctccgggagagcccagtggggctgtcttgtgaggagaggacctggcatgtccgccatggtccagcctgtgtggctgctttcctggactgctgccatctgtctgagaccctgactcgggaggctcgagaggatcaattgcatctgtggacaagtgagggggctatggcaggagatgcagggtggggggcttcatggagggatatagagtgacatgggacaggttaaggggtgatatgggccatggagggttggaaaggaggactccacaaggagtctgatggaacatggaagaaacatgaaggagactccacctcacacctgctccctccagcggatgaagaagaggacttcgatgacctcttcttggatgacatgcctgtgcggaccttgttccccgagagttggctctggaggaagttcactctgccaaagagtaaatcggggtaagacatcagcctccataccagaatctggtcccaggtccttgcaatcatcagtggatgctggtcagggacaatgaccccagcagtgacatcgagcctcaggacagtcccataattgggaaaacatcttaatggattccctaaaaggatgaccctctagtgaggctgtcactaatgaggtgatctgatgatcctcaatagtgaccataacccctgcatggtgaccccaaatccagaagctctatccagcacaaactcagtgatgttttctcactcacaacagcatctcccattaccccatctctgtgaaggtgccagattccatcaccacgtggcagtttgtggtggtcagcctcaaggctggacaaggtgagccgcagcaagcccagtgccaagggaatgggggtatggtgaccttacccagcccctcccccaacggagcctctgcttaaacccaatgtgctctcctggctgtaggtctctgtgtctcggacccctttgagctgacagttatgaaatcgttctttgtggaccttaagttgccctcctccgtgatcaggaatgagcaggtccagatccaagccatgttgtacaatttcagggatcgccaggccaaggtgaagccccaagccctcaacttcctgccaaaacctctgctagtgtgtatttcattttattttttaatggctttatttcattttatttattttttgagacagagtttgctctgtcacccaggctggagtgcagtggcacgatttcggctcactgcaacctctgcctcctgggttcaagcgattctcctacctcagcttcctgagtagctgggactacaggcgccctgccaccatgcctggctaagttttgtatttttagtagagatggggtttcaccatgttggccaggctggtctcaaactcctaacctcaagtgatccacccgcctcagcctcccaaagtgctgggattacaggcgtgagccaccgcacccagcatattttattttatttttggaaacagaatcttgccttgtcacccaggctggagtgcagtgacgtgatctcggcttgctgcaatctcacctcacaggtgcaagcaattctcgtgcctcagcttccccagtagctgggatcacaggtgtgggccaccatgcctggctaatttttagtattttggttagagacaggattttgccatgttgcccaggctggtctcaaactcctaagctcaagtaatccaccctcctcagcctcccaaagtgttaggattacaggtgtgagccaccgtgtccagcctgttagtgtgttttagaaaaggaaattcagtgtatttttattcctatcggtcagtgaagtggtggctcttttggaaaatctaaggtattctcttatttagccaggcatagtgctgcacacctgcagtttcagctacttgagaggctgaggtgggaggatctcttgagcccagtaggtcaacgctgcagtaagctgtgattgcaccactgcactccagcctgggtgacaaagtgagaccttgtctctacaaaaaatgatcttaaaaaaattagccaggcttgatggcatgcacctgtggtgccagctgctcaggaagctaaagcaggaggatcgattgaacccagcagtttgaggctgcactgagttgtatttggaccactgcactccagcctgggtgacagagtgagaccaagaaagaaagagagaaagggagagagagagagagagagagagagagagagaaaagaagaagaagaagaagaagaagaagaagaagaagaagaagaagaagaagaggaggaggaggaggaggaggaggaggaggaagaggaagaggaagaagaagaggaagaaggaggaggaggaggaaagaaagaaagaaggaaagaaagaaagagagagagggagggagggagaaagagagaaagaaagaaagagaaagaagaaagaaaaagaaagaagaaagagaaagagaaagaaaaagaaagaaaaagaaagaaagaaggaagaagaaagaaagaatgaatgaaagaaagaaaggaaggaaggaaggaaggaaggaaggaaggaaggacggaaaaggagaaaagggggccgggcatggtggttcatgcctgtaatcccagcactttgggaggctgaggcgggcagatcatgaggtcaggagatcgagaccatcctggctaacacggtgaaactccatctctaataaaaataaaaaatttggctgggcgcgatggctcacgcctgtaatcccagcactttgggaggccgaggtgagcggatcacaaggtcaggagatcaagaccatcctggctaacacggtgaaaccccgcctctactaaaaaatacaaaaaattagccgggcgtggtggcgggcgcctgtagtcccagctactcaggaggctgagggcaggagaatggtgtgaacccgggaggcagaacttgcagtgagccgagattgcgccactgcactccagcctgggcgagagtgcgagactccatctcaaaaaaaaaaaaaaaaaattagccgggcatggtggcgggctcctgtagtcccagctatccgggaggctgaggcaggagaatggcatgaacccaggaggtggagcttgcagtgagctgagatcccaccactgcactccagcctgggcgacagtgcgaaactccatcaaaaaaaaaaagaaagaaagaaagagagaaagacagaggaagaaagaaagaagagaaagaagggggggagagagagagagagagagagaaaaagaaagaaagaaagaaagagaaagagagagagaaagaaagaaagaaagaagaaggaaggagggagggagggagagaggaaggaaggaaggaaggaagggaagttaaacctcacaacaaccccatcagatgggtactattattgttcttggtttacagatgaggaaattgaggcacagagaggttaaagggcttgcctggagtcacacagcacataaatggcagatggggctctgactcaggctgggtctgtggtcctcatcactaggctttgctgtcacctacgcaggcatctcagggtggggaggggactgtgaccctagggtcctggaccacaccatacatagataccccatccctttgcccatcctgccctaggtccgagtggagttcccccacaaggagacactgtgcagtgcgtcaaagccaggagcaccatcccaccaggtagtggtcgtgccccccacctcctccaagatagtacactttgtgcttctccctctggagacaggcaaagtggacgtggaggtcaaggctgtgggctacggggtccaggaccatgtgaagaagacactcttggtccgggtaatgggcactcccaactcactagctgctggtgcagacagcggggcttccaccaggtccaggctgggcaggtgggcccaggatcgataagcaaggctcctagatgggagtgaggtgagaaagaacagatttgaaagttcagtcagttggctgggcatggtggctcaagcccgtaatctcagcagtttgggagaccaaggtgggtggatcacctgagggtaggagttcgagaccagcctggccaacatggtgaaactccaactctgctaaaaatacaaaaattagctgggcatggtggtgcacacctggagtcccagctactcgggaggctgaggcaggagaatcgcttaaacctgggaggtggaggatgcagtgagccaagattgcaccactgcactctagcctgggcaacagagcgagactcggtctcaaaaaaaaaaaaaaaagaaagaaagaaaagaaaagaaaaaaagaagaaaaaagtttagtcagtggactgatgtgagggggtcaggtcacaagcccccacttgagagttttggagtcaggcctgggttctaatcttgtctctgctgtgtgaccttgggcaacttacttaacttctctgttctgagcctccatttccttgcttgcaggatgaggataatcatcatatccctgaataaacatagagctgggaaaatgacccagaaccagtgtatggcctatcaaaaacattttattagactgggcttggtggctcatgcctataatcccagcactttgggaggccaaggcaggaagattgcttgagcccacgagtttgagatcagcctgggcaatatagcaagacctctctagaaaaaaattaaaaattagcctgacatggtgttgtgcacctgtagttgcagttactcaggaagctgagggaggattgcttgagcccatgagattgagcctgaagctgagatcacgccactgcactccagcctgggcaacagagcaagaccctctctctaaaaaacaaacaaaaaactttatttgcttaacaaacacatgtttaacacttaagatataaatgcttaagaatattaactcgggccaggtgcggtggctcacacctgtaatcccagcactttgggaggccaaggcgggcggatcatgaggtcaagagatcgagaccatcctggctaacatgttgaaaccccgtctctactaaaaatacaaaaaattagctgagcgtggtggcgggtgcctgtagtcccagctactcaggaggctgaggcaggagaatggcatgaacctgggaggtggagcttgcagtgagccgagatagtgccactgcagtccagcctgggcaacagagcgagactcggtctcaaaaaaaaaaaaaatattaactcagtcaggtgtggtggcaccccgccccccccccccccccccggtattcccagctatttgggaggctgaggtgggaggatcatttgagcctagaaattcgagtccagcctgggcaacctgaagtttttttttctctggaaaaaaaattaactaggccaggcatggtggctcatgcctataatctcagcactttgggaggctgaagcaggtgaatcacttgaggccaggagtccaagcctggccaacatggcaaaaccctatttctactaaaaatacaaaaattagcctgtcttgatggtgtgcacctataattccagctactcaggaggctgaggcatgagaatcccttgaacctgggaggtggaggctgcaatgagctgagatcgtgctactgcctccagcctgagtgacagagtgagaccctatctcaaaaaataataataataactaattcagccctccaaacaaccctatgagtgagggactattcttatccccctttgatatatgagaaaactgaggcagagagagggtaactaattttcccaaggacacacagctaggaagcagaagagctgggattcgaacccaggtatttgggctccagagtctgtgcttatcacagccaagcaatgcctcctctcaccatcactgcgattgtcattctgactgtgattgctgtttttgcttttgacttatatcctcatctcatccctcaggcaggggttcagatccagcaaacgtcctatagcatcgtcctggaaccccaaggtttgtgagatctgcagggggcctgtgagatcctggggctgtgctagggaggaggaagcagttggcatgaggggatatgctcagatagggattctgagccccagccccgggctctgtgcaccctgacttccccagccccagagcccacttgtcacagaaggttgtggttattcaggtcagacccagacaaaactggtgccaagacaggagttcttgaacatggtacccgacacggaggcggaagtgtttatcagtgttcaaggtgctgggggacacagggacatggggagggctgacgctgggttctctaaggtccgtgaggcaccagagcaggaggagccgtgtggggcgatcagtaaaccactgtggcttaagcataggccactcccagggtgacccaactcacccacctgacaggtgacatccttggtgagacaattgtgggcagcctgacacccagtgagattcagcagctgctgcgggtccccacgggctgccctgagcagacgctgagctccctgacgcccgtcatcatcctgtcccgctatttggataccaccggccagtggggcaaggtcggggtggagcacagggaccaggtgatgaagaatattgtcagcggtgagagcggggaccctcctggggcctccaagagggtgcctggggatctcccggagggtggctggggcacccccaggattggggaaatcttcatgggaccccccagcccccgcctcaggcattaacacccaaactatgactccttccccagactacaacctgataccaattccccaacgtcatcccccagctgtgacacacccatgggaattcttcacctgaccactttcccaggctttaatctttttttttttttttttttttttgcaatggagtttcattctgtcacccaggctgaagtgcactggtgtgatcttggctcaccgcaacctccgcctcccaggttcaagccattctgcggcctcagcctcccgagtaactgggattacaggtgcccgccaccatgtctggctaatttttgtatttttacttttatttatttatttattttgagacggactctcactctgtcacccaagctggagtgtagtggcacagtttcggctcactgcaacctccgcctcctgagttcaagtgattctcctgcctcagcctcctgcgtagctgggattacaggtgcccgccaccacactcagctaatttttggatttttagtacagatggggttttgccatgttggccaagctgctctagaactcctgacctcaggtgatccacctgccttggcctccctaagtgctgggattacaggtgtgagccaccgcgccagacctccaggcttcagtcttatgacagacaccctgatttctcccaaaaagccatcctgcgagaggatgttatactcaggccctgccccaggttacaccccctcagtgccactcccagggaaccctagggaacacccaagcagcaaaccccagaataaccccaggcagtgggctcttggttgcacctgtatgctgatacttccccaggttacaaccacacaccctagggagcaaccagagatgaacacccctagtaacacccatagacctctgagttaattggtcccaggttaccctcagactccaactttccctccaggttttctcaagcagtaatcccacaggtaatgtccagatactgtcaccccaatgctccaagcaaacagtaaacctccaggggaacttcaagtaatacccgagtagcgaggctcagaatacacctgaaaggctgggtgtggtggctcacgcctgtaataccagcactttgggaggccagggcaggaggatcacttgagcccaggagtttgagatcagcctgggcaacatagtgagacccccatctgtacaaaaaatttaaaaattggctagatatggtggttcacgcctgcagtctcagctactcaggagcctgaatgggaggattgcttgagccccagagtttgagactagcccgggcaacatagtgagacttcatctctaaaaaaattagcctggtgtggtggcacatgcctgtagtcccagctacttgggaggctgaggtgggaggatagcttgaccagggaagggcgaggcttcagtgagctatgattgtaccactgcactccagcctgggtgacagagtgagacccagtctcaaaaaaataaaaataaataaaaagagggccgggcatggtggctcacacctgtaatcccagcactttcggagaccgaggcaggtggatcacctgaggtcaggagttagagaccaccctggccaacatggtgaaacccagtctctactaaaaatacaaaaattagccaggtgtggtgacgcatgcctgtaatcccagctactcaggaggctgaagctggaaaattgcttgaacccgggaggcggaggttgcagtgagccgagatcacactactgcactccagcctgggcgatagagcaagactccgtctcaaaaaaaaataaaagaaaactcccacgtagcacccctcaagttgccccatctcccaggttgcatgtggacaacaacaccttctatgatttcttccagcagcaactccaagggtagcatgccctgctccagagaccctgaggtgaaggtttcctgggttacacccagagacaactgcatcctgggtccctcaaagtcattcctgagccctgctcctcacttacatctgggccctaaacacccctccaaagtacacctggacaacaggtctccccttctagattacctgtatgtgtgacacccccgtgtcacctctagtccctgcccgccaggttattcctgataacactgactgtccctcaaagccctgctctgtttccccaggctacactcagatgctgacccaccggagttcagacggcacctaccacacctccaaggggaacccaggaagcacttggtgaggatgaccctatctctcctgccactgccaccctggaagcccaagggtccagcctggggtctgatgacccaggagcacccacgctgtagagtcatggggtcttggggtgtccagcgcacggccctggggcattctacactggcagacctgggcagcggcgaatgacaggggtccacctggaatggtgtggaccatggtgtagactcccctatcccagagcccccttgactgcggttcgcaggtgtcacttttgccctctcctgacaggctcacaagctatgtgttccgcgtctttgccctggcctactctatgatgacgacccaagtgcttagcctgtcctctctctgtgacatggccaactggatcatcatcgacaggcaggcagaggatgggcacttcctggagaagggccctgtggtcatgacatccatgcaggtgatcacagccctccctgcctgggccattcaaacaaatccgagggactctgtgcactaagagggggatttcaggctcccaatctgttctcgggcagaatgagaacaggaaagagctgaggctcagcgccaaggatcacatcccccccggtctgaaccacctcatactctgttagaatgtgggtgaggctgggcatatctgggaacccatctcttcttcatccccacatcaagcagtggctcgccctggccctcctccctcaggaactgagtcctccccagcttgcatacccatccccaccaagagtcccctcacaccagcgtccagaaatgtctttcaaatgcagcctggcaggtctctcccctgttcaaacacctgctgtggctcacagctatctttgtctgtatcacctcctaggcctcacctcacccctcccttctcactattcacacttaaccactcacgggctcctccaactctcctccaaaaagcgcttttgctgccctctctgcatgcaccaggccaaattattattattattaattttgagacagagttccactctgtcacccagactggaatgaagtggcatgatctcaactactgcaacctccatctcctgggttcaagcgattcttatgcctcagccacccgagtagctgagattacaggcatttgccaccacatccagctaatttttacatttttgttttagtagctggggtttcaccatgttgtccaggctggtctcaaactcctggcctcaagtgatctgcccacctcggcctcccaaagttctgggattacagacatgagccacggctggagtgcagtagcatgatctcggctcactgcaacctctgcctcctgggttcagcctattgttattatttttagggacaggatcttgctctgtcgcccaggctggaatgcagtagcttaatcatggctcattacagcctcaaacttctgagctcaagagatctccctgccttagcctcctcagtggctgggactacagatgcacaccaccattcctggctaattttttttttttttttttgagatggagtcttgctctgttgcccaggctggagtgcaatggcgcaatctcggctcactgcaacctctgcctcccgggttcaagtgattctcctgcctcagctccccaagtagttgggactacaggcacacaccaccatgcccggctaatttttgtagttttaatagagatggggtttcaccatgttgaccaggctggtcttgaactcctgacctcaggtgatctgcccatcttggcctcccaaagtgctgggattacaggcatgagccatcacccctagcactgacatgatcttctttttttttgagacggagtcttgctctgtcgcccaggctgcagtacagtagcacgatctcagctcactgcaacctccgcctcctgggtttgagcgattcttctgcctcagcctcctgagtaactgggactacaggcaagtgccaccatgtccagctactttttgtatttttagtagagacagggtttcaccatattggccaggctggtctcgaactcctgacctcgtgatccatccccccacccccccggaaccccgccccttggcctcccaaagtgctgggattacaggtgtgaaccacagcacccggattttttttttttttttttgaaacagagtcttgctctgtcgcccaggctagagtgcagtgatgcaatctcagctcactgcaacctccgcctcccaagttcaagcgattcttctgcctcagcctcccgagtagctggaactacaggcttgtgccaccacgcccagctaattttttgtatttttagtagagatggggcttcatcctgttagccaggatggtctcgatgtcctgacctcatgatccacccgcctcagcctcccaaagtgctgggattacagacgtgagccaccacgcccagccgacatgaccttataaggacaccagttattagacttagggtccaccctaatccagtatgaccttttcttaattttaattacatcctcaaagacccaatttccaaataagatcacatcttgaggtcccaggtgaacatgaattttggggtcactattcaagtccagagaggggaagagggtggaagccagggtactaaagtggtgtttggaccctgagttggccattttctagcaatgggaagactttgccactctgacctctgttttctcatcagtaaaatggggctgctgctagaatgctctgagatggtctacagagctcagcttcttgtgttgatagctttttgtttgtttatttgttttgttttgttgtttttgagacagtctcgctctgtcgtccaggctggaatgcaacggtgtgatctcagctcactgcaacttctgcttcccgggttcaagcgattctcctgcctcagcctccccagtaactgggcttacaggcacccacatcatgcccagctaatttttgtatttttgtagggacagggtttcaccatgttggccaggctggtctcaaactcctgacctctggtgatcctcctgccacggcctcccaaagtgctgggattataggcatgagccactgcgcctggccgatatcttttgttagtagggcagaccccagggaggcaaacctctcctctctgtcttcatcccacctccaccatcatccagcccagagctgggtacctggaaacttctcagggtcagacaggagaggctgaggaaggcatctccaagacgctgagggaatcacagatggaactctgcatccacaggatggctaccaaggctccgaggaggatgtatccctcacagctcttgtcctaatagccctgaatgagggaaaggagttgtgcagacagaaggtaggaccccagagaggagggcaggatctgtaaggtcctctagccccagcatctggaaagctcccccaccctcacatccctctgggtccctctaactcccagacttctttcctctgatcatctccctctggcccctccctctggccctctagaatttgatggccagcatcgagagagcccgtggcttcctggagagaaaacttcccgacattcagacaacctttgccgtagccatagcctcctatgcactggcccttgccaacagctcccaagccaacgactgcctggacagctttgccagccctagtgggtgtgggatgcttcttaatcaacctcagtcatggagtggggagggggtgatctcaaatccagcaatgtgttattcatcacttagtgtttcctgagcatccactgtgtatcacctcctgagctcagaccctgtgagaccaaggtgagcaacactggtaagttccctgccctcaagggtcccaccgtccttggaagagacaatcagaaggtcactatataattccaaactgaggcttggagcagcggctcacgcctgtaatcccagtactttgggaagccgaggcaggtggatcacccttggtcaggagctcgaaacaagcctggccaacatggtgaaacctcgtctctattaaaaatgtaaaaattagctgggcgtggtggtgggtgcctgtaatcccagctacttgggaggctgaggcaggagaatcgcttgaagccaggaggcagaggttgcagtgagccaagatcacaccactgcactccaccctgggtgacagagggaggctctatctcaaaataataataataattccaaaatgagacaagcactgagatgataacacacaaggtgggtgggagagatggcaaggggaggggagtacaggttggagggctgagatgaaagatggaaagacatacctgctaggtgtgatggctcatgcctgtaatcccagctacttgggagtctgagacaggaggatttcttgaggccaggagctcgagaccaatctgggcaacatagtgagaccccatctataaaaaaagtttgcaattagctgggtgtggtggtgcgcacctgtagtcccagctagtagggaggctgaggcaggaggatcacttgagtccagaaagccaaggctgcagtgagctgtgatcatcccactgcactccagcctgggcaatagaccaagactctgtctctattaaaaaaaaataaaaaaataaaaaataaaaaatagaaacttttttttttgggacggagtctggctctgttgctcaggctggagtgcagtggcacgatcttggctcactgcaacctccatcacccgggttcaagcgattcttctgcctcagcctcccaagtagctgagattgcaggcatccaccgctgcgcctggctaatttttgtatttttagtagagacggggtttcaccattttggccaggctggtctcaaactcctgatctcaggtgatctgcccacctcggcctcccaaagggctgggattacaggcatgagccaccgtgcccggccaaaaaaaaattatttatttatttttttatttattttgagacggagtctcgcactgtcccccaggctggagtgcagtggtgcgacctcggctcactggaagctctgcctctcggcttcatgcccttctcctgcctcagcctcccgagtagctgggactacaggcgcccgccatgacgcccggctaattttttgtatttttagtagagacggggtttcaccgtgttagccaggatggtctcgacctcctgatctccacccatctcggcctcctaagggctgagactacaggtttgagccaccgtgcccggccaaaaaaaaaaaaaaaaaaaaaccctttttaaggcacaccttcatgaaaggccatggacatttcaagcaaagggaacagcacaggcaaacaccctgaagtggaaagagtgcttggtgttgtcaaggatggaaaggttataaaaccttcccatgggccgggcgcggtggctcatgcctgtaatcccagcactttgggaggccaaggcgggcagatcacttgatgtcaggagtttgagacaagcctgctcaacatgacgaaaacccgtctctactaaacatacaaaaaaaatcagccggtcgtggtggcacatgcctgtaatcccacctactcgggaggctgaggcaggaaaatcacttgaacacgggaggtggagtttgcagtgaaccaagatggcgccactgcactccagcctgggcaacagagtgggactccatctcaaaataaataaataaataaataaataaaaatttaaaaaaaatcccatggctgatgctatctcatccccaagggtccatatcccatcttccccattctgcaagtcaagcaaagtggaactaggaaaatttgcttgcaatgggactggagggacctgaaggaattttttttttttttttttgtcatccaggctggactgcaatggcacaatctcagctcactgcaacctccacctcccaggttcaagtgattctcctgcctcagtctcctgagtagctgggattacaggcacccaccaccacacctggctaatttttttgtatttttagtacagacagggtttcaccatgttgaccaggctggtctcgaactcctgacctcaggtgatccgcctgccttggcctcccaaagttctgagattacaggtgtgagccaccgcgcccagccaggaactttttttttgaaactcaatttcccgatcggaaaatagagtcccgtttcccagggtcattctgaaaattggatgtccacgtttcctcagcaaagagcttcacataaagtaggtgatcaggactgggcatggtggctcacgcctgtaatcccaacactttaggaggtcgaggtgagagaatggcttgaagcctcccggcctcaagaccagcttcgacaacataatgagaacccccccaacccccactcccccatctctacaaaaaataaaaataaagtaggtgatcaataagatggcagatgagaaaactgggccagatgacacaaagagagggcaggttaaggtgggtgggcccagctctgggtgacaaggcgggcgtccctgtttctagacaaaacccactggccagtggatgagcagaatctgggctccctgtacaccattgaggccacagcctatgggctcatgcagaagctggagctgggccggtacaatgagacacacgccatagccaagtggctactagagaagcaggagctgggaggaggcttcaggtccacccaggtgatggggacccccgggaggtgagggccagagtcactagccgaagtgctgactcgcccagcccgacgggggagtgtgtgtgtgtgtgtgtgtggggggggggggctgtccgtggtgctgacacgccggccgatggtttctcgagtgctgtctgtggtactgatccacgttcccccacctccccgccccattccaacactcagaccacggtggtggcccttgaagctctgacccgcttccgcgaagctgtccccttcaagggcatccaggatctccacgtccagatcagagcccccaagacagccctgaatgtgaattggtacattgatcacagcaatgcctaccaacagcggtcagcaaaggtatgtcactgaggggcaggccagagtccacgcagagatggcactggagatgaggccaagcatcatgtccctgctgatctccctcctcaagacatacctcaagatatgtggctatactgtcaatgtattgattcatctattccatcaacatttcctgagcatctactatgtatcagcgactctcctaggcattggggttatgttatgaaagatccatggtccctgttcttatggaatctagaagagtccctaagatctagaagaaaatgggccagatgccatggcttacgcctgtaatcccagcactttgggaggccgaggtgggtggatcatctgaggtcaggagttcgagaccagcctggtcaacatagtgaaactccatcctactaaaaatacaaaaattactcgggcatggtggtgcatgcctgtaatcccagctactcgggaggctgagacaggagactcacttgaacccagaaggaggaggttgtagttacctgagattgcacctgagtgacatagtgaaactccatctcaaaataaaaataacaataaataaataaatgaaaagaaatgtcaccctgggcaacatagcgagactccatctctactaaaaaagaaaagaagaagtaaatcaactcatctaagctcatgcattgtttagtggatgtccctggataaatagttgtcaaaatgaagaaagcagagggaggggaagagtgtttctttttattgttgttgttgttgttgagacagagtctcactcagtcacccaggctggagtgcagtgacgtgatcttgcctcaccgaaacctccatctcccgggttcaagcgattctcccgcatcagcctccccagtagctgggattacaggcacgcaccaccagcccagctaatttttgtagttttagtagagatggggtttcaccatggtggccaggctggtctcgaaatcctagcctcatgtgacctgcccacctcggcctcccaaattgcagggattacaggcatgagccaccacgcctagccaaggaagagtgtttctgacatagggaacagcatagagtgcagacccggagccagtcaggcacaggaatggtcagaagggagaacagcaaataaagcaggctattaggaggcttgcaggctggcagagctcagcagtgagggctgggaggccatggcaagaattaggacttatcctataggcgataatatttgatcctataggcaatgagatttgagtgattgtgactttttttctttctttctttctttttttgttgttgttgttttttgttttttagagacagggtcccactctgttgcccaggctggagtgcagtggcacaaacatagttcacggcagactcgaattcttgggctcaagcgatcctcctgccttagcctcctgagtagctgggactggacatgcattgcaatgcccgacttaattttcaatttttttggtagagatggggtctagctaaattgcccaggcatgttttgaactcctgggctcaagcaatcctccccacttggcgtcccacactgctgggattacaggcatgagccactatgtttggcttggctgtgaatttttaaaattttattctggctgatacaagtagactataatgaggaaaacaagagtagctgcagatgaagatagagattagattggtggttgccagaggataggaagtgtacaaagaaagggagggatgaaaagaagttgattaatgggtacaagcatacggttcgatagaggaaataagaccgagtgtttgatagattcataggatgaatatagtttacaataatctattgcatatttcataatagctggaagaaaagaattagaatgattttagcataaagaaaagacaaatatttaaggtgatggatatctgaggtacactgatctgatctttacacattatatgagtgcattagattatcacacgtgccttgaaactatgtacatccattatgcatcaatttttgttttttgagatggagtctcactctgtcgcccaggctggagtgcagtggcacaatctcagctcactgcaggctccgcttcctggggtcaagcgattctcctgcctcagcctcccgagtagctgggattacaggcgcctgcctccatgctcacctaatttttgtattttttagtagagacggggttccaccatgttggccaggctgctcgaactcctgaccttaggtggtccacccgcctcggcctcccaaagtgctgggattacaggcatgagctactgcacccagcccattatgcatcaattttaaaaggcaaagaaaaataaagagaggtgcagaggtgccagtgagaaggggctcatgggagctccatgcacagggaaccttggaaatgctccaaagagaacagattccagggatgcacattaggacacagcctgaactgagccgtgcagatgatctgacgtcaggagttcgagaccagcctggcaaacatgctgaaaccccatctctacgggcgtgacagcacaagcctgtagtcccaactactcgggagactgaggcaggtcaggagaattgcttgaacccaggaggcagaagttgcagtgagccaggatcacgccactgtactccagcctggacaacaaaatgagactctgtctaaaaaaaaaaaaaaaaagacagccttagactggacatggcagctcacgcctgtaatcccaacactgggagtccaaagcgggtggatcacttgaggtcaggagttcaagaccagcataaggaacatagttagatcttgtcactacaaaaaaatacaaaaaaaaaaaaattagccaggcatggtggcacacacttgtagttccagctacttgggaggctaagacaggaggattgcttgagcccaggaggcagagcgcaccaaagtgagccaagatcgcaccactgtactccaatctgggctacagactgagacctggtctcaaaaaaaaaaaaaatacacaggctggatgagcagttccagttgatctatgatagtgtagacaccacaaatgctctctgaagagggaaaagcaaaaccatctgcgtggagagagatggaaaatgaatcaccaggtcccaggttagggaaaaccgaggccctggtgagtgttcaggctccacatccccctacacttgaccctcactttgctgcttcctccacccttaaatcttcctctttgttctcttcagttccttgcccaggacgacctagagatcaaagccagtggcaacgggagaggcaccatctcggtaggtcttgtattctactgtattagtctgtttaggctgctacaacaaaatagactgtgtggcttataaacaacagaaattggcccagcatggtggctcatgcctgcaatcccagcattttgagaggcccaggcaggagaatcacttgagtccaggagttcgagatgcaccagggcaacagagtgagactctgtctttacaaaaaattgaaaaattagatgggcatggtggcacatgtctatagtcacagctactcaagaggctgaggtgggaggattgcttgagtccaggaggtggaagccgcagtgagtcgtgatcaagaccttgcattctaccctaaatgacagagtgagactctatctcaaaggaaggaaggaaaagaaagagaagaaagaaaagaaaggaaagcaagaaagcaagaaacaaagactcggtgcagtggcttggctgggcatggtggctcacgcctgtaatcctagcactttgggaggccgaagagggaagatcacctaaggtcaggagttcgagaccagcctggccaacatggtgaaaccctgtctctactaaaaatacaaaagttaaccaggcatggtggcggtcacctgtagtcccagctacatgggaggctgagacaggagaatcacttgaacacagaaggcagaggccaagattgagccattgcaccctagcgtgggtgaccagagcaaaactctgtcagaaagaaagaagaaagaaaagaaagagagagagagagagagagagaaaagaagaaagaaagaaaggagaaagaaagaaaaagtgagaaagaggaaagaaagaaagaagaaaaagaaagaaagaaagaaaggagaaagaaagagagagaaatttattgctcacagttctggaggctgggaagtccaagataaaggcagggtacactctctgtttcaggccgggtgtggtggctcatgcctgtaatcccagcactttgggaggccgaggcaggcagatcacaaggtcaggagatccagaccatcctggctaacgcggtgaaaccctgtctctactaaaaatacaaaaaattagccaggcgtggcggcatgtgcctgtattcccagctgctggggaggctgaggcaggagaatggcctgaacccaggaggtggagcttgcagggagccgagatcgcaccactgcactccagcctgggcaacagagcaagactctgtctcaaaataaataaataaataaaataaaataaataagtaatctattatactcatattattatttatttataacctaaataaataaatataggccagtcagtgtgattcatgcctgtaatcccagcactttgggaggctgagtgctgggatgacgtccatgactttttttttttttttttgagatggaatctggctctgtcacccaggctggagtgcagtggcacaatctcggctgactgcaacctctgcctcccaggttcacgtgattctcctgcctcagcttcctgagtagctgggactacaggtgcacagcagcatgcccagctaattttttgtatttttagtagagacggggtttcaccacattggccaggctggtctcaaactcctgacctgaagtaatctgtccgccttggcctcccaaagtgctgggattacaggcatgagccaccatgcccagcctgacgtccatgacatcttccagccccatgacgtatacccgggaggacagctcttttgttaaccaaaaggtggcctggtgtcgtgttccagacaatggagtcatggctgaatctctgcctttgttatgtgaccctgagcaagtcatacctttcttcaagcctctgtgaaatctaagtttaaatgggttaaaattaaacaaaattcaaaattcagtttctccgtcgagctagccgcatttcaagtgtttggtagccacatgtggctaatggctgccatactggacaatgccaattgggaccatttccgtcactgcagaaagttctatgacacagagctggtctagactccagacactgctctggccactgcacctaggaattgatggggtcggtgggggcaatcttgcagtaaattccccacatggccagagacctgggaagtcaaggattggggtgcagaggaaaggcagtgggtggggaagggctctgacagccccctttcctggcccggcagatcctgacaatgtatcacaagtccccagagtcccgggaggacaactgcaacctgtaccacctgaatgcgactctccacagtgccctagaaggtaagcctggtgtggctacaggaggagtaagggtagagttttaggagaagaagttggaaaggtgatgggggaagatggtgtagggacttgttagccacagtgaggactttggcttttgttctgagtcaggtggggcatagaaagttcccaacggaggaggagtgtgacctggcacaggtctgcacaggctccctctgatctgaccactctagagggtgagggtgggagccaggtgaccaggaaggtgactgcactggtcctgcaggagatgatggaggccgggccagattaggggctctggagatgatcagatattagtgggccgggcacagtgactcatgcctgttattccaacactttgggaggctgaggcaggaggatcacttgagctcaggagttcaagaccagcctgggtagcatagtgaaactccatctctacaaaaaattagctgggcatggtgatgcatgcttgcggttccagctactcaggaagttgaggcgggaggatcatttgagcccgggtggaggctgcagtgaaccatgattgtgccattgcactgtagcctgggcaacagagtgagaacctctttcaaaagaaaaaaaaaacaaaaacagagaaatagttggattccacagttcccagcctggggcaccaagaaggagagaggactattgggagctcactgtgggagtaagaggaacaaccctcaccagtcccatgaattttagggactaaacctcaccaaggttttggtttttgcttgatctcttaataataataacaataataataatagttacaaagcactgatcaggcaccatgctgagggctttacttgtattaacttatttaatcctcacatcaatcctgttgggttgggaatattatgatccccccttaaggatgagtaaactgaagcagagagaagttaagcaacttgctcaaagtcacacagcagagtcaggatttgaatccaagatgctagctccagagactgtgcacttgattactgtgctccccagcctctaaactgctgccttctctctgcagaaaataaaaagggaggtgagacttttcggctccggatggaaacaaggtcagcgcaccaggatcttgaactgggagggaggagggtctcactttccggtatctagattccttagcggccttccccgtgtactgagtggacagtgggaaccagccaagcttgcctctccatgcctgtcccccattctgtacctgcctccttccatgtctgcatgtcctcatatgacaggctctacctcagctgacatgctccatgactcagatgcccagagctggctccaagccctgaagctctccccgtggttctcattttctccgaacatcccagcccccaccccagtcctgccctgtcccatacctcccttgcccaggtctgcttcagatagaaacattattgggcacctactgtgtgccagaccctgttcttggagctagggacccagctatgagcaaggcagcctctccctgccctggcgaagcccacagtctatcaggagacacacacaatcatcaaataatcacacagaaccaataatgaaatggcagtggtgatttcatgtggcaaaggagaggtttacagagtcatgagaggcaaatcagagaatgatctgggcctggtgcggtggctcatgcctgtaatcccagcactttgggaagccaagaggatcacttgagcccaggagtttgaggccagcctgggcaacacagcaagacctcatctctaaaaaaaaaaattcaaaaattagctaagggtggtaatgcatgtctatagtcccagctactcatgagcctgagactggaggatcacttgagcccaggaagctgaggctacagtgagccatgattgagccactgcactccagcctgggtgaccctgtctaaaaaaaaaaaaaaaatgatttggtgtgtggggtgtaggttggggaaggcttcccagagggagtgatgtatccgctgagatggaaaacatgaggggtgtttcaggatgaagaggcagaaacgaagattccaggctgagtgaacagcatgtgcaaaagtctggtggcaggacagggaacaaggctaacagtgatcaaatggaggctgaggtgggaggaggtgatgtggaagggtgtcaggattgaggcaaggcatttggtaattgaagcaacgaggcaaggtagtcagatttctgcttgctaaagctctgtgttgtgagtggcaaaggggacatggggagacctggaaggaggctactgcgctggtccaagccagagacaacagcagtggggagcatggagagagaggcgggaggatagtggggaaagactggggctgtgaacttccaggttccagaacaattgagaggccacaatgactatcatggaggtctccctgctcacgggcttctaccccaaccaggatgacctcaaacaggtaatgcagaccccacctacctgcttcctgagcaaccttcccatacttcccacatgggtgcagggcagtgtctactcaaagcaaggcttctgggttaatgccccatcgttacttctctgcatggccaaaaccaaacttttccctggttgggcctcagtttcccctagcatggggttgattggacaaaggctggagctctagggctacgggccttggagactgtcagccaccctccagtctccaccctctgccccagctcacgagtgatgtggagaggtacgcctttcagtacaaaaccaagacaagtaccagcgacagcactgttgtcctctacctggaaaaggtgagaggggccgggtgccctccgccagaggtgtgtgggtaccctgggggctggagaacccaaggtcggtcccctgggtgggttttgcagagagccaggccctctcaggtcagctcctccagttgcgatccctgtggtcaaggccacatggtccgtggtcatggccaatgccaacagccaaggcctcgtggtcagtgccacaaggtcagtgccccagtcagtggccctggccggctcagacaggactctgttctctccagctctcccatgagaagaacacggtgctgggctttcgggttcacaggatgctgcaggcggagttcctgcaggccgccctggtcaccatctacgactactacgagccttgtaaggaggggcccccgtgcatggggatgaggcctgcaaaggacagagccaggtgccaggcgaggagagaccgggcattgcgaaaagggggctgggcctggctagacataaggggcgaggtcttattggattgacctaggttggcggggacaggaaggagatggggcaaagttgaagggggactgggcgtggcctgctgggaatggatggggaaggggcaggctcttttgagtgggcgtggcctgttgacagaggtggctggccagggcccttcaaagtgaggtttgtagggggcagggccaggaagaggggaaggtctgggaggacctggagggcgcagcccagggacaaggaggggcaggagggagcctggactttggaggatggggaaggcaggccagggcccggagtgggtgaagacttctcaggactaggccaggtaggcaacgaacccccaggaacactggcccaagacaacgccctcccccaacccctgcaccctccatccacagcccggaggtgcagcactttctacaacctgcccacagagcaatcttccctgagaaagatctgccacaaagacatctgcagatgtgcagagggtgagatgtgccgagggtgagccccatgccaccaggctggggctgccaggttgtggggggcggatccaggagcccttcaagcctcctcctggctgtagtctggcctgagtttagacagaaagagaaagagacagaggcagaggcaaagagagacagaaagaaggcacagagagacaaagcttgtcacacacacatactcgcactgccaaagatcaaatgacacggagacagagagaaagacacaaagagacgaagacgggagaaatagacaagaaagtgaccaaaaagagagacagacactgggcatggtggctcatgcctgtaatcccagcactttgggaggccaaggcgggaggatggcttgaggccagaagttccagacaagcctgggcaacacagtgagaccccatctctaccaaaaaatttttttaaaaaattagccaggagtggtggtaagtacccgtagtcccaaatacttgggcggctgaggcggaaggatcaggagttggagactgtagtgagctatgcttgtgccactgcactccagccagggtgatacaacaagaccttgtctcaaaaataaatttaaaaagccgggctcagtggcttacacctgtaatcccagcattttgggggccaaggtgggtggatcacttgaggtcaggagtttgagaccagcttggccaacatggtgaaactccatctctactgaaaatacaaaaattagctgagtgtggtggtgcatgcctgtagtcccagctactcaggagaccgaggcatgagaattgcttgaacctgggaggtggaggttgcagtgagctgagatcacagtgcattccagccagggcaacagcacgagactctgtctcaaaaaataaataaataaataggccaggtatgatggctcacacctgttgtcccaacactttgggaggccgaggtgagaggattgcttcagcccaggagtttgagaccagcctgggcaacatagtgagagaccccaactcttaaaaatataataataataagagagagagagaagaaaaagaaaggaaggaggaaggaaaaagaaaagaaaaagagagagagagagacagagagagagccccacagaccagaagggccagatccggagacccaggcctgggggctgaagggagggagggtggggggtgattgggaggaagtgccctgtcccagcaccgccagagcagctgccctcctgaccctgcaggacagtgcccatccctgcagaagcccagtggccaattgaggcaggaggagctccagacaacagcatgtgaggcaggcgtggattttggtgagtgtggggagccacaggggacaggcagagcccacctgcaggccgaatgccaacatgacaccctccccttccccagtgtacaagacaaagctggaatctgtggaggtctctgcctccaacccttacgtctattacaacacgcagctcgaagacatcattaagagtggtatgtcccaggtgacaaagaaggaatcccagtgtggggtcaccctgggggcccaccctgggggtcccattgtgtgggagggtcagacctgtgtatgtgcacacaccgggttttctccaggtacggaccctgccacacccctggccatgaagaaattcgtctcccatgccacttgccatgactccctggggttgcaagaacaggaatcgtacctcatcatgggccagacgtcagacctgtggagaatcaaatctgagtgcgtgaggggttccacctgtcctggggactcaggcctgggccttcttgcctaccctcaacccagccctcagttccacaatttttgctggagatttcaagcaattctcctgcctcagcctcccaagtagtagctgggactacatgcgtgtgtcaccacactgggctaattttcgtattttcagtagagacagggtttcatcatgttggccaggctggtcttaaaactcctggcctcaagtgatccacccacctcggcctcccaaaatcacggggttgcaggcgtgagccaccgcacccggccagggaagcatttactaattcccagtgatttggactaagaggctggaagatcagagagggccctcgggtgtggacactacaggctaaggctctggcaggctgtcagacagggcagggaggtccccatatccccaggggcaccaggctctcctcaccttcttgcttcttgtaacccacagttacagctatgttctgggcaaggagacgttcctcatcctttggccagcagatggagatgccagcaagaaagaattgcgggaccaactggaggaatttttggaatatatgcgcacccacggctgccagtcctgagcctcttctgctttcagggaggtgtcatcaggcagctctgggccactgggtttaaccccaaataaagagcacaggatatgacacccaaaccctggacatttgtccctgtgtcagctttcaccaggggacctgcacaacctgctctggcataatgtggacctgtctcctccctcttcccctgctacttgggcggctgaggcaggaggatcacttgggagctggctctccaagagtcaatattccaagagaaggagcagagggagccatagtaccttttatgacctagcctcaggggtcacatgccatcatttctgcaacgtcctattggtcacatgagccagtattattcagcatgggtggagactacacaaggcatgaccactaggaggcagggttcactaggggaataaatttcagcaggccatggtatccaatccatttaatgtgctgctggatttggtttgttaacattttgttgaggatttttgcatctatattcataaggaatattggtctgtagttttctcttcttgtggtatcagtgtctggaatgctggccccatagagtgtaaaagaaattaagaaatattcttgggagccatggtggctcaggcctgttgtcctggtgcacaaggaggcaaggctagaagtttgaggccaacctgggcaatataaaaacctctcgtctatataacaacaacaataaaaaaactagccagcacagtggctcacgcctgtaatcccaacactttgggaggctgaggcaggcagatcacctgaggttgggaattcgagaccaagctgaccaacatggagaaaccctgtctctacttaaaatacaaaaaaataagccaggtgtggtgatttgcctgtaatcccagctactcgagaggctgaggcaggagaatcacttgaaccccggaggcagaggttggagcgagccaagattgtgccattgcactccagtctgggcaacaagggcgaaattctgtctcaaaacaaaaggcccagcacagtggctcacgctcacgcctgtaatcccagcatttgggaggccaaggcaggcagatcacgaggtcaggagatcgagaccatcctgtctaacatggtgaaaccccttctctactaaaaatacaaaaaaattagccagacgtggtggcgggtgcctatagtcccaactactcgggaggctgaggcaggagaatggtgtgaacccaggaggcagagcttgcagcgagccgagatcgcaccactgcactccagcctgggcgacagagcgagactccgtctcaaaaaaaaaaaaaaaagaaaaagaaaagaaagaaagaaagaaagaattttctcctcttcctgagcatgatggttcacacctgtagtcacagcactttgggaggctgagtcaggcagattgcttgagtccaagagttccaaaccagcctgggcaacatggaaaaaccctgtgtctaccaaaaaatacaacaattagccaggcttggtggtatgtgcctatagtcccagctactttgcaggctgaggtgggaggatggattgaccctggaaggttgaggctgcagtgaactctgttcacaccacagcattccagcttcagtgtgacaatgagaccctgtctcaaaaaaaaaaaaaatccctcttccagtctgggcaacacagcatgaccccgtctcaaattaaaactttaaaaaatattggccgggcatagtggctcacacctgtaatcccagcactttgggaggctgaggcaggcggatcacctgaggtcacgagttggagaccagcctgaccaacatggagagagcccgtctctactaaaaataaaaaactagccgggcatggtggcacatgcctgtaatcccacctactagggaggctgaggcaggagaatcgcttgaacccgggaggcggaggttgcggtgagccgagatcgcaccattgcactccagcctaggcaacaagagtgaaaccccgtctcaaaaaaaaaaaaagaaagaaacaaaaagaaaaaagctgggcatgatagcacacaccagtagttccagctactcaggaggctgaggtgtgtggattccttgagcccaggagacacaggcagctgcaatgagctatgaccaggccactgcactccagcttgtgcaacagagaaaagccctgtatccaagaaaagaagagagacagacagagagagagagagagagagagagagagagagagaccaggtggagtggctcactcctgtaatcccaacattttgggaggctgaggcaggaggacaacttgagtccaggaattcgagactaacctgggcaacaaagtgagaccctgtctctacaaaaaaatcaagaaattagctggatgtggtggtgtgtgcctgtagtcccagctacatgggaggcaggaggattgcttgagcccagaaggtcaaggctgcagtaaatcattcacaccactgcactccagcctgggcagcagactgagaccctgtcgaaaaggaaagggatgggacaagacgggacaggacaggacgggacgggatggaatgggacgggacgggaagggaagggaagggaaggggagaagaagaagaagaagaaggagaagaagaaggagaaggagagagaagagaaaagagaagagaagagaagagaagaaggaggaggaggagaggaaggaaggaaggaaggaaggaaagaaggagggagggaaggaggcagggagggaaggaaggaaggagggagggaaggaaggaaggaatgttccttcctcttctatttgttggaagcatttgaaaagaatgtgtacttaacttattggtagacttcatcactgaaatcattcagtcatgaccttttcttgtttggaggtttttgattactaattctagttcttattacagatctgttgagattttctatttcttcttgagttagttttatgtatttctagaaatttgttcatccagatagattatctgatttgttggtgaataattgttcatagcattctcttataatcctttaaatttctgtaaggtcagtagtaatgcctctattttcatttctaattttagttatttgcacctttttttcctttgtcagtattgctaaaggtttgtcaattttctttatctttttgaagaaccaacttttggtttccttgagtctttgtctatttatttattattattattattttgagatggagtctctctctgtcacccagcctggagtgcagtggcacgatctcagctcactgcaacctctgcctcccaggttcaagcaattctcctgtctcagcctccagagtagctgggactacagaagcgtgccaccacacccgactaatttttttgtatttttagtagagatggggtttcaccatgttagccaggatggtctcgatctcctgacctcgtgatccctgcctgcctcggcctcccaaagtgttgggattacaggcgtgagccaccgtgcctggcccattgagtcttcaaatttctccactgtttctcctttttctttctttcttcctttttttttttttttttagatggattcttgctatgttgcccaagctgctggtcttgaattcctggactcaagtgattccccactcctcagcctcccaaagtgctgagattacaagcatgagccactacgcccagctatactgattacttttttaattttagtttttattcattttcacagacagggtctcactctgtcacctaggctggagcgcagtggcatgatcatggctcactgcagcctgaactcctgcactcaagtgatcctcctgccttggccccccaaggagctgggactacaggtagaagccgccacacctggcctgtccttattatctttttaggatacatgaaaacaaaaagattcccccaaaggcagacatgtagaaaagaaaatggggactgggcgcgatggctcatgcctctaatcccagcactttgggaagccaaggcaggtggatcatctgaggtcgggagttcgagaccagcctgaccaacatggcgaaacactgactctactaaaaatacaaaataattagccaggcatggtgacgggcgcctgtaatcctagctactcaggaggctgagatgggagaattccttgaacctgggaggcggaggttgcagtgagccaagattgtaccactacactccagcctggacaataaagccagactctgtgagaaaggaaatgagaggagaggggaggggagaggaggggaggggaggggaggaaaggaaaggaaaggaagaaaagaaagagaagaaaagaaagtgggaaactccatcgcaagcctttatcgtacgctcctccccgcagaaccagaacgtgcacatcctgcatcccctattcaacatggaaaacacttgagtagccaaggacaaaaatatgtaatgtttcttactgtgtgtacaccgggacttcctccttctggatcaaacacttcttaatgtgtaactttttggaggaggagtccaacacgctttgcttttgcaatcagaaaaggaaaaaagggcagagtatcatgcttagaggggagagaatgctatcggcaaatttaaaattccaaaatgtaaagtagaaagaggacattgtctgtccatcccacatcccagaattacaggtctggtgtctgcaccgactggctttttttttttttttttttttgagatggagtctcgctctgtcgcccaggctggagtacagtggcttgatcttggctcactgcaacctccgcctcccgggttcaagcgattcttctgcctcagcctcctgagtagctgggactaaaggcctgcaccaccacacccagctaatttttatatttttagtagaaacggggttttgccatattggccaggctggtctcaaacactcctgacctcgtgatccgcctgcctcagcctcccaaagtgctgggattacaggcgtgagccatcacacctggccccgactggctttttctcagtactttccctcggggccttctggccttggttctcctccagaatgtaggatcaatgattaatgatggatgtttctgctgtcaggagctgagatgtggcagcagtccctggagtggagtgaggaactgtttcccacaggccacgccctcggaaaagcaagataaaccaaagtggtgggcgtggtggctcacacctgtagtcccagcactttgggaggctgacgtgggaggatcacttgagtccaggaggtcaaggctgaactgcactccagcctgggtgatgtggcaagtccccacccccaaaaaaagaagaaagcagctagacgtgatggctcatgcctataatcccagcactttgggaggccaaggcaggcagatcccttgaggccaggagttcaagatcagcctggacaacatggcaaaaccctgtctctactaaagatataaaattagctgggcatggaggcacacgcctgtaatcccagctactacttgggaggctgaggtacgagaatcccttgaatccaggaggcggaagtagcagtgatgtgagatcacgccattgtgctccagcctaggcgacagagcaagactctgtgtcaaaaaaaaagaaaaaaacaaaaaaaaacaccggaaagaaaagaggctgcgctcagtggctcacgtctgtaatcccagcactttgggaggccaaggtgggaggattacctgaagtcaggagtttgagaccagtctggccaacatggtgaaaccctatctctattaaaaatataaaaaactagccaggcatggtggcgggtgcctataatcccagctactcaggaggctggggcagggaattgcttgaaccaatggggtgggggttgcagtgagccaagattgcaccactgcactgcagcctgggtgacagagcaagactctgtctcaaaaaaaaaaagaaagaaagaaagaaaagaaggaaagaaggaatggagggagggaggaagggagggagggagggaaggagggaggaaggaaggaaggaaggaaggaaggaaggaaggaaggaaggggagaaggaaggaaagaaggaaggagagaaggaaggaaggttggttaaggactgtctggttccaaagcatgcccccttcatctctacaattcttaacctaaattccagcttgaaggagtttgcagtcagttggcctgagttcaaatcctggctataccacttataaactgggtatccatgtgatttgcttaatctcttggaggctcagtttcttcatctgtaagggccaatcatgcctaagccagaagatcctaaggcctagggcataacctgcagacagcctgacactcagtgagctccagatacactcagggaatttattttagccattataatttctccactcaccactcaccaaattcatttgagcagagccccattaaacaggttcctcaacttttgcacataatgtattcctggaaaaatgtatgaaactgatttcacaaaagtcgaacaacagatttctgtgctacaaaggatgttccatttactgagaactactcaaattataaaatcccaaattacttctcacctgttaggcatcattgtcaaagatagtgtccagggtttcatacatgttatttttaaaaattaattggattggctgggcgtgatggctcatacctgtaatcccggcactttgggaggctgaggtgggcagatcacgaggtcaggagttcgagaccaacctggccaacatggtgaaactctgtctctactaaagatacaaaatattagctgggcgtggcagcacgtgcctgtaatcccagcttcacaaggggctaagccaggagaatcgcttgaacccgggaggtcgaggttgcagtgagcagagagcacgccattgcactccagcctgggcgacagagcaagacactgtcttaaaaaaagaaaaaaagaaaaaagaaaagaaaattaattggatttatcttattgggtatttttttttctcactacaaaatgatagattagatgcttgttgcaagaaaaattcaaaccaggtgcagtggctcatgcctgtaatctcagggctttggggggccgaggagggaggatcacttgagcccaggaggtcaagatcagcccaggcaacatagtgagaccccgtctctacacaaataataaaattagctgacatgatggtgcacacctatcgtcacagctacttgggaggctgaggcaggaggatcgctcgagcccaggaattcaaggctgcagtgagctatgatgatgacacggcactccagtctgggtggcagagcaagactctgtctcaaaaaaaaaaaaaaaaaaaaaaaggccaggcgcagtagctcacgcttgtaatcccagcactttgggaggctgaggcaggcagatcatgaggtcaggagatcaagaccatcctggttaacacggtgaaaccccgtctctactaaaaatacaaaaaattaactgggcgtggtggtgggcgcctgtagttccagctacttgggaggctgaggcaggagaatggcatgaacccgggaggcggatcttgcagtgagccgagatcgcaccactgcactccagcctgggcgacagagcgagactccatctcaaaaacaaaaaaaaggaagaagaataagaggaggaggaggaggaagagaaggaggaggagggaggaggaggaaggaggaggaggaaggagaaggacaaagagaagaagaagacagcaacagaaaatgagagacatgattaatccagcatgcttaatagtttagtagtagatttttccatggtgtccttcccaaaaggtttcaccaacggatgctgtctctaatgatttgggagatttctcatttccctacagcttctccagctctgagcattcccgatcaatttttcatttgactcaactggagtgggaaattgactagattgtgaaaagcatgcacatgctccaatggtctccatctcctccacaatattttttttcttttctttttttttttttttttgagatggagttttgctcttgttgcccaggctggagtacaatggcacgatctcggctcaccgcaacctccgcctcctgggttcaagcaattctcctgcctcagcctcccgagtagctaggattacaggcatgcgccaccatgcctggctaattttgtatttttagtagagacagggtttctccatgttggtcaggctggtctggaactcccgacctcaggtgatccccaccttgggctctcagcctcccaaggtgctgggattacaggcgtgagccaccgtgcccagcaatttttttttttttttgagatggagtctcactctattgcccaggctggagtgtagttgtgcgatctcggctcacggcaacctctgcctcccgggttcaagtgattcccccacctcagcctcccgagtagctgggactacaggcacacaccaccatgcctggctattttttgtatttttagtagacaggattttgccatgttggccaggctggtttcgaactcttggcctcaagtgatctgccctcctgggcctcccaaagtgctgggattacaggtgtgagccactgcacccggccttcctccataattgaacacagtcgcccagcttaagcctccaagggtccagttccaggtcaagatttgctgctttttttgttttgttttgttttgtttcgttttggttttgagacagagtcttgctctgtcacccaggctggagtgcagtggcataatcttggctcactgcaacctctgcctcctgggttcaagtgattttcctgcctcagcctcccaaatagctgggattacaggtacccgccaccacgcccagctaatttttgtatttttagtagagatgaggtttccatgttagccaggctggtctcgaattcctgacctcaggtgatccacctactttggtctcgtaaagtgctggggttacaagagtgagccaccgcgcctggctgatggggtctcactatgttgcccagcatggcctcgaaatcctggcctcaagtgatcctcctgccttggcttcccaagtgccgagattacaggcatgagccactgtgcccagtcaatgagcttttaatgtacataatgtggctgaagtgatgtgggactttcaggctagatcataaaaagatacaacttccacctggctctcagctcttggaaggtgctcgggaggccagctcccatgctgggagtacactcatgccactcaagtatactgggaggaatcgaggcatcccgccaatcatagcacccatctgcatgccctgagagtgagccaccttggaagcagattcgccagcccccgtcaaaccttcagatgactgaagccctgaccaactccttaactgcaaccttctgagaggccctgagccagaacagcccagcagcaaagccatttctcaagtcctaagctacaaagaccacatgaaatcataaggatggaccaggtgcagtgactcacacctgaaatcccagcattttgggaggccaaggcaacaggatcacttaagcccaggggttcaagaccagcctgggcaacatagtgagacccccccgcccccagctctacaaaaaagtataaaaattagccgggagtggtggcacatgcatgtagtcccaactactcgggaggctgaggcaggagaattgcctgaacccgggaggcagaggttgcagcgagccgagatcgtgccactgcactgcaacctgggtgacagagcaagactctgtctcaaaacaaaaacaaaacccaaacaaaacaacaacaaaataacaaacaaattagccggatgtggtggcacatacctgcagtcccagctactcagaaggccaaggccggaggattgcttgagctcaggaggttgaggctgcagcggagctatgattgtgccactgcacgccagcctgggtgacagagtgagaccccgtctcttaaaacaaatttaaaaaaatgctagctctacgagggcagggatctttgttttgtttgctgtcatgtccacagtgcctggaacagcattgggaacagagtacacgctctatgtggttgccacggtgattataacctaacagacctttggtctgcatattctgcgctaaaaaaaaaaatcaaaaaacaaaaaacctaccagatctgatttatgtcagggctagctcagactcttacctgtttcctgcccactcagtgcccatctcggccagtgaatgggacatagctatgacctccctctgcactgggcaaatagattagtaactggcaactatgacaggcgatccactccaaacctcgccacttccctcaggataaaatcccaggtcttctgtgcagtttccagcccccatcctgcctaggattccaccattcagccacaaggaatcatgaactgcttgtagtttgcaaatacagtagtctccagagtggagtacatacaccctataaacaaagctttggggttcaactggaaaaactttagaatatctagatttggggggttttattgtttgttttttagtcttttaaaaataactttttccttttcttttttctttttttaaagacaaggtcttgctatgttgcccaggctggttttgaactcctgacctccagtgattctcccaccttgacctcccaaagtgctagcattacaggtgtgaaccatcatgcccagctccatttatctatcaatattttatataacagttaacagaatatattgatataattgtatttgtatataatttataaataatatccatctttgaggccaggagtttgagaccagcctgggcaacatagtgagaccccgtctctacaaaaaaaatagaaaattaaccaggcatagtggcatatgccagtagtcccagctacttagcaggctgaggcaggaggatcgtttgagcccaggagttagaggctgcagtgagccaccatcaaaccactgcactccagcctgggcaacagagcaagatcttgtctcaaaaaataaataaatgaataaatatccatctgggggtgtaactttaacacttttacctataggggtgtgcaatggagaaaaaaatttggagtcgttgaacacaatgctattttgctcctcagagagtatccggcagtctctggagacgtttttggtagtcacaacagggagagtagggaaccactggcatctagtgggtggaggccagggatggtgttaaatgtcccccaatacacaggacagtcccccacacaaagaactaggccgcccaaagtgtcaagagtgctgggcttgagaagccattgcccaaaaaccccagacttagtcttgctttgggggctctgcacggctgcctcatctccccactctattcctcccctagctaagacctccaatttcagtgactctacaaagcatcccctcctccaatgaagttgccatctctgtgtccccaggctgggccagagccccaccacctaagggctccctgatgtgccctgtactgggttagaattgtccgtcccacggggttcttaaccattgcagattccctggatccctgagacagccggattctaccgggctactagagaccaagaatctgtatttttctcaagcaccgctccccccaaccacacacacactgcctgcccctatcaagggcacacagcaggtggcccagtgactagttgaacgcctactgcaagccaggcgctattacgcgatccactcgggaatcttggcacatactccactccatggtgtagacaccaggattctccccatttcacagaggggtaaactgaggttgagagaggtgaccgtagctaggacagagactcagggcaggaaaagggcccaggtcctcatgagcgccagattcccggggaaggagggagaacagagaggagggtgatgaactgggggagcgcgcgctgggtgggggggcgcggggcctcgccgcggccttctgatgcggccccgcccccacgagggacgtgaagacgcggaccccgcgcagcgtggggacatgtgaccgactgcagaggccgcgccgcctcccccgtccgaggtctgcgcgctccgccgcagggtgcagacccggggcgcccgcctgggtttggggcgcaagagcagaggcggagccagggcggagccagcgcgccgggtcccccctgaatcgaaagcgaaacaggggccggggaggaagggcggagccggccccgaggcaccgccccctgccctgcgcggctgctggaccgacgggcgcacccaggtaggggggcggctgagccgcgcagtgcggaccctcgcggggaactgcgccgccgccaccatgtctcaggaaggtgtggaggtaagcgatggctacggctgggccggggtcagccgcgacagaccccgaggagcggccgggaggcgcggagggggcttcgcagttcctggggacccccatcctagaaccccagatccttacccctgcctggcgctcgccccccttgaaaaggaaagtgactcccacgtttccccagagcgaaatgaggcctccccgaggaaaagcgggggctgcagggtcaaaggtcagaggccagagataacctggccgcccccccacaccttaggctgggacgctcgccccagtccgcgccttcccccaacgccctgtggggactttggctttttccaggaaatgccgtaaagggatgaaaggcggggggggggcggcggaggccaaaaccaagggtcaagttcgggccgggagaacggtgcctagagatgggggagggatgatcccgtttccccttcccccaccggaacccccctgtctccatcccagctggagaagagcgtccggcgcctccgggagaagtttcatgggaaggtatcctccaagaaggcgggggctctgatgaggaaattcggcagcgaccacacgggagtggggcgctccatcgtgtacggtgaggctgcaggggtcccgggcctggtgcggggaccgcgcgtgggagcgccgagggggcgtggtctagggagaggcgttgagatcacctcccccggaggtcccagccttggggaggctctgcgtcgcggctctgggtggcctggaactcccacagacccttcaagggcccttcccttatatgcactctcccccgcaggggtaaagcaaaaagatggccaagaactaagtaacgatctggatgcccaggtaacctatcccctcccctcgcaaaggaccgggtcacgggagggagagcaagaggggggacccgacccgttcatggtgactgacccccctctgaaacaggagggaccaggcattgtcggtccataactcatcacccaatctcactttttcacctctccatcatttgtccggccagggagcctgcaaacagtaggcgctcattatgtgctgattgtattcaatgggggagagagccatgaaactaagcaatgaaaggagccaggattattgccatcatagcgggggcgcagaggtcagagaaggcttactggaggaggaggtaccaagtcttaaaggatggggaggagtgagccctgggaggggaaagggaaagaaaggcaggggtcttggggtgggggagggaatggcataagcaaaggctgggaggtggggaagggttgttagtggcagtctctagaaaggctaggatgagcagaggattggggaggagagagaggcaggggaatggaacccttgtgttgaatgaatgaatgaatgaatgaatgaatgaatgaatgaatggctttgaagcacaggtgcatcatggctactttgcttctttgacagctttggtgatgggaacgctgtggatttagcctgcctgaaaggcttagtgtagggctgttaaagagtataataggccaggcgcggtggctcacgcctgcaatcccaacattttgggaggccgaggcgggcggatcacctgaggtcgggagtttgagaccagcctgaccaacatggagaaacccgtctctactaaaaaatacaaaattagctgggcatggtggcgcatgcctgtaatcccagctactcgggaggctgaggcaggagaatcacttgaacccaggaggcggaggttgcagtgagctgagatcacaccattgcactccagcctgggcaacaagagcgaaactctgtctcaaaaaaaaaaaaaaaaaaaaaatgccgggcgcggtggctcacgcctgtaatcccagcactttgggaggccaaggcgggcggatcatgaggtcaggagatcgagaccatcctggctaacatggtgaaaccccatctatactaaaaatacgaaaaaaaaaattagccagttgtgctggcaggcccctgtagtcccagctactcaggaggctgaggcaggagaatggcgtgaacccgggaggcggagcttgcagtgagccgagatcgcaccactgcactccagcctgggcaacagagcgattctccgtctcaaacaaacaaaaacaaacaaaaccagagtataacaaaacatgtatcatagtctacatttatacatataaaagtatgataaaaatgatagcagaggggccaggtgtggtggctcacgcctgtaattccagcactttgggaggttgaggcgggcagatcacttgaggtcaggagttcgagattagcctggccaacacggtgaaaccccttctctattaaaaatacaaaaaattagctgggcgtggcagtgcatgcttgtaatcccagctacttggcaggctaaggcagaagaatcacttgaacctgggaggcagaggttgcagtcagccaagattgtgccattgcactctagcctgggagacaagagcgaaactccgtctcaaaaatataataataataataataataataataataataataatattagcagagagtagcattcattgagtacttcccacatggcaagattccaggaatttatttatttcatcactgcagtgaccccaggagacaggtcctattatttatccccatttcacagacaaagaaactgaggccgaagtcacttgccagcaagcaggggcagctgcgatttgaaccctggccacctggagtcagagcctgggctctaacatgcctgtcagtgggaacccagggggcagggagtggcttgcccaagtccccacagctggaagtgatacagctgggatttgaacccacatctctctcccacttagccgagcacaacgtggcctcaaaggggcgatatgtcacaacatcaacaagcatgtggcatttgcaggcaggaagtgagtatgggggtcaggctagcctcactcaggcaagccctcccctaagcctcagtttccccatctgagcaataaggtaacaggtgtgcccacctctcagggctgctatgaggacaactgaggccacacacctggctctcaataagtgagtggtgctctgtgagcttctggcgagttaggggcaccctactcattgcggccgggggcctcccccagcaaacgggtggaaagaggcctgagccccatccccagtttctgcccctgctatctccacccaggatccaccagaagatatgaagcaggaccgggacattcaggtgagttggtggctagggcttgggatgggggagttgggagggggacatctgcaggcacagaaggatgtccattagggcaggaggggagatattcactggggcaggaagaggactcgtctgtagggagaggagggctgatgcttatgttggtgcagaaggggtgacacccccccacctcatccccacctgccccattccacaggcagtggcgacctccctcctgccactgacagaagccaacctacgcatgtttcaacgtgcccaggacgaccttatccctgctgtggaccggcagtttgcctgctcctcctgcgaccacgtctggtggcgccgcgtgccccagcggaaggaggtgatgacctaaaacttaacctcgactttgactgtcccgaactccactcctgactcctatcctcagtgactgtacctctgacctaaggatttcaatcactgagagtccaatccctgacctccaaactcagagctcagccttgatctctgatcccaacccctgacccaggactggacttctgaccttaaatgtgagaagcccaatacctccttaccccagaacctgacccttgacccacaattgaacagctactacagaaatcaaacctggccaggcgcagtggctcatggctgcaatctcagtgttttgggaggctaagtagggaggatcgcttgaatttaggagtttgagaccagcctgggtgacagggtgagaccctgtctccaaaaaaaaatgtgttttgaagacagggggtctcgccctgtcacccaggctggagtgcagtggcgggatcatagctcactgcagcctccacctcctggcctcaggtgatcctcccacctcaacctcccaagcagctgggactacaggcctgcgccaccacacttggctaatttttgtattttgtgtgtgtgtgtggagatggggttttgccatgttgcccaagctggtctcaaactcctgggctcaagcaatctaccacctcagcctcccaaagtgctgggattacaggcatgagccactgtgcctggcaaaaaaaaatttttttaattagctgggagtggtggtgtgtgcctgtggtcccaactactcaggaggctgaggtgggaggatcgtttgagcctgggaggtcgaggctgcagtaagccatgatcacaacactgcattccagcctgggtgacagagcaagactctgtctctaaaaaaaaaaagaaagaaagaaaagaaaccaaatctgacctcaaaaacacagccccaaatctggcttctgaacctcctgactagtagttcacttctggtcaatgcttaactagttcttgcaaaagaggcaggaagccaagatgtgtagtgtttgccaatttctgtggtgtaaatattcccaccatggtcaatatcaggctacccacgtgaagtcactgattgagttgggttgctcaagctgaggccagccgctgcagcacactgctagccctgaccccaacctcagacacctctgacaatccttggtcccctctctgtaccttcctgcccaccaccaccaggtatcccggtgccggaaatgccggaagcgctacgagccagtgccagctgacaagatgtggggcctggctgagttccactgcccgaagtgtcggcacaacttccggtgagggcgctgacccccagctccccctcagccctgccctaccccagccctgcccctccctgccctggccccaccctggcccagcctcgccctcggaccctcacagccctgcccgcccccaggggctgggcacagatggggtccccgtccccctgctacgggtgcggcttccccgtgtatccaacacggatcctccccccgcgctgggaccgggacccggatcgccgcagcacccacactcactcctgctcagctgccgactgctacaaccggcgaggtgaggctcttctcccccaacagcctggacagtctttgtccccttctgtgcctttaagtccccaaatctccactcagtccactttgtctcccacagcagcagccactgcttccacatggcctccatgaccccccagtctccgtggtcttgcccaggaggctctgaggtttcaccccagtggcccgtgcctgagggtccccatggcctctgcccccatggtctctgggtttggggcccctgttttgtcccctgtaatctcaggtgacccccatgtccccaggtctcctgtatcttcaacacccctgaatgtccagttgtgctggtccccgtatctggtggtctcagctcctccctagagccccgcgtggcctaagtcccctcctccccagactctcatgggacctccagccccatgtctgcagcacctctccctccctagagccccacgtgcctgggacatcctgtgctcaccccaagagccggaagcagaaccacctgcccaaagtgctccaccccagcaaccctcacattagcagtggctccactgtggccacctgcttgagccagggtggcctcctggaagacctggacaacctcatcctggaggacctgaaggaggaggaggaggaagaggaggaggtggaggacgaggagggcgggcccagggagtgacccctgccaggtgcagatacaaaccagacacggtctgtggctactttgtgttattataagatatgagctcaaaccgagatatgaatgaccttggggagccatctgaggccaagatattgacgggggggattcctgggtcccattttcagcgcccagggtcacagatccacagtgggaagttctgtgggacacattggcactgagccacaaagaaggtgtggccagaacaacttgggctcctgctgaccaatgtcctctagggcctaggggacagaggaacacagagtcacagcttcaggggccgaatgagcatggcggccttcctgagagaatatgccccaccacgaaactcagcccagtagacaccatcctggtagcggcttcggtagtggccgccgtggtgccacacaccgttgaggttggagtgggcacaggcatggtaccaccagcctccccgctggtacagggcacagttacctgaggggagagagagagtccatgtcctctcaccagaataaaagcctctacctgcacctcacagtgcaaggcttttgccaggcatcccctggcccctcccattcttattgaatacaagccctgatcttccatctcctcagcaaaaaaataggagccctggccccccaactttcttcagagtaatagccttaattccttccctatctccttaccaaagtacaagtcacatctttcccaccttttctgcaaactaggagtctaccgttcattcctttatcaaagaaaagtatctacttcctttctagaataagagtactagctctcaccctctgccctttacttgaacaggagtcttgattctttttttgcctcatcagagaaggaatctggactccccatccccccaccaggataaaagtcctgacctttgttctcttgacggaataaaagcttgcttatccttatacttaccagaggggcgtcttacctaccctacctcctttcattccctcaccagaacaggagtcccgcctcccctatcctctcaccagaataggagttctccttaccagaataggagtctcggtccctatccacggtgctgaagggcttgtcattgtgccaggaaagagagtctccagcatcaccatggtactggccaagccgcaggcggtagtggtcgctctcgggttccagggagaagccatcatagtgggcacgtgctccacggcccccccagtcctccaggagaaccagcagctcatggtccccacggctggtcagctgatacacgggttcaaggcccagccagtattctccgtctggccgcccaaagcccgcctggcagggcaggaaagtcaggaagccagaacaggctccctccccttccctgcctctgcccacctgtgcccaccttatagtgctgccaggtagtgaagaagttgactgaaccatcttgcctccgctggatcacagtccagcctccaccctccagttgctgctcacaccatactgacactacgtgacggcccactcgcagttcatacactccactctgttcatggcctgcctggcgggcctctgcacaatcctgccacgggcctgtgggcacagggataggggggaggcacagcctgggctgaccaatcccttactggagcaagagtcaagattctcacaggtcctctcaccagaataagagttctgcctctcccacttttctaccaaagagtcctgcctctcccatttcctcaccagaataagaggcctgcctctcccatttcctcaccagaatccgagctccaatagccatttctttacctaagaatctgggtcccttgtctctaatcaaaggaaatgtcaagtctggggttctttttttttttgagatggagtctcgctctgtcactcaggctggagtgcagtggtgcgatctcggctcactgcaacctcatcctcccaggttcacgcctttctcctgcctcagcctcccgagcagctgggactacaggcgcccgccaccacgcccagctaattttttgtatttttagtagaaatggggtttcaccgtgttagccaggatggtcttgatctcctgacctcgtgatccacccgcctcggcctcccaaagtgctgggattacaggcatgagccatcgcgcccggccaactctggggttcttaaaccctggttttttatggtctcctcaccataatataagtcctgaatatgatactctgaaccagttcaaactcttaccaaagtagcagtcccaaacatcgcctcactaaagtaagagtccctcctcttctatttcttgtttctcctattttcacaccttagaagtttggtcttatttttaatcagaataggagtatcatttcttctggtcttctcacaatgagagaaatctgccactaaaatcctgactcctcaattttcctctacccacaattcctcagccctaatgtcgacttacccacaggcttggtggggaccgcagggtgacctgcaggcatgggagaagccatgggctcctgctgtctctgggtctggtctctctggggctctggggctgggtccagcatcctactggtgtcactggtgctacccacaagacggaccggaaccacaggcaccagtgggggtggcggcaggacctggggtgacggagaaagtcaggtgtaattgcactaaccctcaggccaggaggcctggtctcaggggcagaaatggtggataaatctcccagctcccaaatgacctggacatctggcagtgggggtgtcccagccctaggaatgatcctccccaaaagctaaacaacttggctttaaagtgcagacaggctgggcgctatggcccgtgcctgtaatcccagcactttgggaggccgaggcgggcggatcacctgaggtcaggagttcgagaccagcctgaccaacatggtgaaacctccgtctctactaaaaatacaaaaaaaattaactgagtgtgttggctcacgcctgtaatgccagctactcggaaggttgaggtaggaggatcgcttgaacctgggaggtggaggttgcagtgagccaagattgcaccactgcactccagcctgggagacagagcgagactccatctcaaaaataaaattaaaaaaataaagtgcagacagagctgggcttaaataccggctcttggtgctcatggtttaattgatctgtgccccagcctcctctgtagagtagggataataacaacacatccaacagtatctaacttactgactcctctcaccaaccctgtaacgtagggactgtcacagagcaacattctcttatcccaaacccagaccaggacacgttccagaattcagaataacacggctggatttagacacagtgacacagggagggttatgtatatgcatgtgtgtatagaatatacataacactcctaaaggggtttttggtctttacgtgataatgatatgtttaattataggatcctatgactattcacattaagtggttaagtgaaggctataaatagccaccagtcactttttgacccaaataagttaccagaaggggcgagtaggaatccggttttcagggttttgcggatttcagaactgtggataagagatcgtggggttgcaaaacccccatttcacagacgatgctgctctccggggaggctgcgaggttacctgctgctgcccgcccgcgcctcccgggcacaggcgctccaggcgggcgatgagactgctctgctgggtgacgagctgcgccagctcgcggaacttgacgtccagctggtggaaccgggcggctgcgcgctgagcctcggcggacgcgttgagcacgcgctccccgagcagcgccagcgccgcggcaggctccgcccccagatccgcccccgggcccgccccgggccccgcctcgtgctgcagctgcgcgcgcaactggcccaggcgcgcgctcaggccgcggctctccttgcgcagcgcgcgcacctcgccggccacggcgccgtcggccgccgccagcctctgcagctcgcgtaacagctcctcgtggcggccgacgcgcatgcgcagcgccgccagctcgctggcgttggcggcctcgggcgtcgcccgcgtggatgcggggccgctccagcacacagcgcccgtgaacttctgcgggggcagcacgaaggtgtaggtgcagcgcggggcgcccgcccgcgcccacgacgcgcccagcaggagcagcagctgtagcgcacgcagccagggcttccccatcgcggcggacctgcaggcagaggaggaacggaaggaagacggggtgctggggcccagcgagacccctccgcttccacgcggggatgcgcgcgtctacacccgcgatgtcccgggcccataatttcagtccccatctcattccccccacggctggagggccccagggtgatcccactctggcttcaacaccgagctcttggcgccaggccggataacgcatctcaagcattcattcattcgacaagcgaggccgggcgccgtagctcacgcctgcaagctcagcactttgggaggccgaggcgagaggatcgcttgagaccaggagttcgagaccagcctgggcaacatggggagacccctgtctctacaaaaaaaaaaaaaaaaaattagacagacgtggtggtgcacacctctggtcccagctattcgggaggctgaggcaggaggatcacttgagcccaggagttcaaggcttcagtgagccatgatcgctcccctgcactccagcccgggcaacaaagtgatagcccatctcaaaaataaataaataaataaaaacaaggcttatggggccgttcaggccggtaattccagcactttgggaggccgaggtgggctgatcacttgagcctaggagttggagaccagcctagacaacacagagagaccctgtctatacaaaaaatacaaaaattagctgggcatggtggcaagggcttgtcatcccaagatcgcctgagcccagcagttccaggctgcagtgagctgcgatcacgccactgcactcaagcctgggcgacagagcaagactctgtctcaaaagaaaaaaaaaaaaaagcagtcactaggcacaaatgtgtgccagccccctttctaggcactgggaatacatttaggaacaaaacagacaaaaatccctcccctagtgggcaaaaaaataaatatgtactgtataggatgaataaatagagcatattagacaatgttaaatgctaaaaataacagtagggccaggcgcggtggctcactcctgtaatcccagcactttgggaggctgaggcaggtggatcacgaggtcaagagatcgagaccatcctggctaacacggtgaaaccccatctctactaaaaatacaaaaagttagctgggcgtggtggcgggcacttgtagtcccagctacttgggaggctgaggcaggagaatggcgtgaacctgggaggcagagcttgcggtgagccgagattgtgccactgcagcccagcctgggtgactgagcgagactccatctcaaaaaaataaaataaaataaaataataaatataaaaataacagtaggactggtgaggcggctcaggcctgtgttaaggcgggaagactgcttgaggccaggaattcaagaccagactccagactgggcaacgtatccagaccctgtctctaccaaaaaaaaaaaaaaaaaaaggaactgcaagtgcacagaaccacatctggctaatgtttaaattttctgtatagtcagggtcttgctatgttgcctaggctggtctcccctggcctcaagtgatccacctctgcctcccaaaatgctgagattacaggtgtgacccaccatgccctgctaatttttaaactattttgtaaatctgggctcagtggctcacacctgtaatcccagctctttgggaggcagaggcgggaggatcgattgaggccaggagtttgaagctgcagtgagctatgatcgcagcattgcactccagcctggggacgagagcaaaccctgtctcttaaaacaaaacaataacaaaaaacagcaaactaggtaaagaatacgcaggtctgtgcaggggcagcttgagagggggttgcctaaagggaaggcctggtggaggagcagatctaagtgcaaaagctctgagactggaccctgcctgatgtattaaagcaacctgggagaggttaaagcaaaagcgaagggaggctgggtgctgtggctcatgtctgtaatcccagcagtttgggaggccaaggtgggtggatcacctgaggtcaggaattcgagactagcatgaccaacatagtgaaaccccatctctactgaaagtgcaaaattagccgggtgtggtggtacaggcctgaaatctcagctacttgggaggctgaggcaggagaatcacttgaacctgggaggtggaggttgcagtgagccgagatcgcaccaccgcactccagcctggacaacaaaagcaaaacactgtctcaaaaaaaaaaaatagcaaagggagcagggtgcaaggaggtgaggtggggtgagggaaacgtctcactaactgccttcccatccgtcggatattggaaaccccatcttccacgtcctcagaccaaaaccccagcagatccaacccatctcagcagatctaatccatcagccagacccgtctgctcttctgcttagatcctgaattcctccacgtctccgctactccccactgcccccagaccctccctgaattcccagctcaagacaccatctggatgacagcagctgcctccctgctctctggatttccatcctcaaccccaggtctagtctctctgacagcagccagagggcgcctgtgaacatctgagtcagttcacgtccctccctccctcctctgccctgaatccttcttggctcccacctcctttagaggaaaagcccaaatccacccatgatccataaaaagttgcgctatcttggtgactcacgcctgtaatcccagcactttgggaggcggaggcgggcggatcacgaggtcaggagatcgagaccatcctggctaacacagtgaaaccccgtctctactgaaaatacaaaaaaagtagccaggcgtggtggcggctgcctgtagtcccagctactcgggaggctgaggcaggagaatggcttgaacccgggaggcagagcttgcagtgagccgagactgtgccactgcactctagcctgggcaacagagcaagactccatctcaaaaaaaaaaaaaaaaaaaaaaaaacttgtgctatctgccatatccccttctgccctcctcccaggcccttcctcacacgaagcaagttccagcctcaggtcctttgtacctgctgtttttgcagcctggaacattgttcacaacttaacatcattcccttcctatccttattcaagtctcagcagcgctccttgaacagcagatttagggttgtacctccatatacaagctctctctctctctgtctctccctctctctctctctctttctctctttctctctctctctctctctctctcccccacgccctcttttttttttttttagacggagtctcgctctgcaatctcagctcactgcaacctccacctcccgggttcaagtgattcttgtgcctcagcctcccaagaagctgggattacaggcatgcgccaccacacccagctaatttttgtatttttagtagagacagggtgcctgatcaacaggtgaaatcccgtctctactaaaagtacaaaaaattagctgggcgtggtggcgcatgcctgtaatcccagctactcgggaggctgaggcagaagaacggcttgaacctggcagaggttgcagtgagctgagaccgcaccactgccttctagcctaggcaacctgggtgagactccatctcaaaaaaaaagaaaaaaaagagagagtcgtgctctgttgcccaggctggagtgcagtggagcaatcatagctcactgtagcctccaattcctgcacacaagtggtcctcctgcctcagcctcctgagtggttggaactacaggtgcgcaccaccatgcccagctacttttttgtagggagggggtctcactgtgttgcccaggctagtctcaaactcccaggctcaagtgatcctcccaccttggactcccaaagtgctgaaattacagatgtgagcaaccacactggccctaaacctatgcttcctgatgcctgcacaagcacatatcccgagggtctccatctcacacacacattgcctcattcatgcattcaaccacagacaccttgagtgcctattgtgtgccagggatgctgttttaggcaatgaggacacagccttaacccaaacagacaaaattcctgcccttgcagagctgacattcaagttgggagaacagagaaataagtcaaacagccgctaggtaggtcagagggtaatcgtgcttaggagaaaaatggaacaggcaagggggtgacagtcccggaggtgggggacatttaatagaggagtcaggactgggtgtgctgactcacgcctgtaatcccagcactttgggaggccgaggtgcctgtaatcccagcactttgggaggccgaggtgcctgtaatcccagcactttgggaggctgaggtgggaggatcacttgaggccaggagtttgagaccagcttggctaacgtggcgaaaccctgtctctactgaaaatacaaaaattagccaggcgtagtggcacgcgcctgtagtctcagctactcaggaggctgagacacaagaatcacttgaacccggaaggcagaggttgcagtgagccatgattgcaccactgcactccagcctgggcaatagagcgagactctgtctcaaaaaaaaataaaatagaggagtcaggaaaggcctcacagaagaagtgacacttgactggaacagtgcctcatgcctgtaatttcagcactttgggaggccaaggcaggaggattgcttgagcctaggagtttgagaccagcctggccaatatggtgaaagtccatttctactaaatataaaaataaaaataaaataaagaataagggacactttcacaaagacctgatggaagagagagaagaggaagagcattccaggcagagagaacagcaggtgcaaaggcccggagattgcacccaagaaatggcagaaaggggccaggcacggtggctcacgcctgtaatcccagcactttgggaggccgaggcgggaggatcacctgaggtcgagagttcaagaccagcctggccaacatggtgaaaccccgtctctactaaaaatacaaaaattagctgggcatggtaatgcatgcctgtaatcccagctactactcaggaggctgaggtgggagagtcacttgaactcaggaggccgatgttgcagtgagcagagattgcgccattgcactccaacctgggcgacagagcaaggctcaaaaaaaaaaaaaaaaaaaaggccaggtgcggtggctcacgcctgtaatcccagcacttgggaggccaaggcaggtggatcacggggtcaggagatcgagaccatcctggctaacacagtgaaattccgtctctactaaaaatacaaaaaaaaaaaaaaaaattagccgggcatggtggcgagcgcctgtagccccagccactccagagactgaggcaggagaatggcgtgaacccggaaggcggagcttgcagtgagctgagatcgcgccactgcactccagcctgggtgacagagcgagactctgtctcaaaaaaaaaaaaaaaaaaaaaaagaaatggcagaaatgtctatgaggccggaagagagaagggggaagcaggaggaggtaagaagtgtcagggcaaagtgtgaagggtcctgtgggcccggaggaggacttgggttttactctgagtcaggcaggagccatggagggttctgggctggagatggccacatttacttctggactcagacaccaagcaggggctcacaaggatccgggggtagggtcctctctttgtccccgatcactgacatgccccaccccccacaacagagattgagcaaccccccagaactgggacgtgtgtataacacccgctgccttttacactctcagcctggggtggcggggtggcctgggggcccccaagccaagctgtggtcggagtttccccacagtgagaatcaacctccacctaccttcccaccctctcacctctgatgcccaagaccctgaatccagcgaagctcacagaacacacaagaagtccaaggaagagccgagggtccagtggggcctctgagctagagacggggagagggcagtgggacagaaggagagaggaggcttggtaaccactccccagcccccagagcctgggagtggagctgggatgctgggcccaggagcccaaactataaatatttagcatttcccgaatgagaaatgagacagaattgccagacccccctgcccaggccaccagagcctgataacacaggtcagtgtcctggacatccctccctttcccccacaccctccactgcagagcccagagcgtgggaggctgcaggccctggggcagccaggcgtgatcccagccccagacacgcacacaccacacatagaaagaggaacatcactggggacttaccgtgtgtagggcttggctctaaactctccacaccttttacgtatttgatccttacaacctgagctggattctgtatgtaccctcattttacagcagggaaaactgaggctcagagagggtaagcaacttgcctgcggtcacacagccaaaaagagaccaggatgggagccagccaaggtagcttgactcagaaactcacacatgtacaccacagctgtcacacacatatgggcacataacagagtggacacaaacacacacacacacatttgcacgcacgcacacattaacacccagcgaaagtctgggtgcagtggctcatgcctgaaagccagcactttgggaggccggggcaggtggattacctgaggtcaggagttcgaaaccatccttgccaacatgctaaaaccccgtctctactaacaatacaaaaattagctgggcatggtggcatgcgccagtaatcccagctacgcgggaggctgaggcaggagaattgcttgaagccaggaggtggaggttgcagtaagccgagatcgagcaaccgcatgcactccagcctgggcgacaagactgaaattccatctcaaaaataaataaataaataaataaataaataataaataaataataataaagtgaggaattaattaattaaaataaaaaataaatataaaagacacagctgtaaatttttaaattgtgatagaaacaatatattcttaaagtgaaaaccctacctcagttacatgtgatttatgttttttggattaatctggattttataattagaaataaaaatgtaaggctgggcgcggtggctcacgcctgtaatcccagcactttgggaggccaaggtgggcagatcacgaggtcagcaattcgagaccagcctggccaagatggtgaaaccccgtctctactaaaaatacaaaaatttgccgggtgtggtggcccatgcctgtaatcccagctactcaggaggctgaggcaggagaatcgcttgaacccggggggcggaggttgcagtgagccactgcactccagcctgggcgacagagtaagactctgtctcaaaaaaaaaaaaaaaaaaaagaaaagaaataaaaatgtaagattttgagtccacataattatttgttgaaaataatacaagtcagtataatagagaagcattcatatattcaacactgtgagacaaaacaccagagaccttggatttgataattgatctgatatcctggacagtattcatatgtacagtgatagctatctttctttggtgttttttttgttttgtttgtgtgtgtggtgtgtgtgtgtgtgtgtgtgtgtgtgtgtagttttatggttctgagttggtggccagtaagttccatgtagtgttggcacttatttaattaactattcatgattttgttaatagcttgttatagaattcaggcatatatttttcagcataagaagccaagcacaccagcttgtcattggagagaatatattaagtgagaaaaacattcaggaatcagagctttaacatgttaaagttagtgctaaacattgtcatattggatctgaacctatcctaatatataaccataaagcttgacttctgcattggaactatgctttcataaataaaggatatctcattgattaaaaaaaatttttaaaaagacacagctggaaacataacagtttcaggcaacaactgtatgttccaaatatggtcacacacacatcacaacttaaagggaaatggggtgggctgagtgggtctttatctgtgtgtcaggcttgtccacatcctggttcttgtgatcacacagtagtgcacagatacaaaacaggtacacacagttgacacccggaaacctatccaccgcaccacagaggtcaccgtctgtctcccacacactcggtcacattttcacacaagtcaaatcacacgaggacggaactgggggaagtaaccatgcagtcatttcccaggggtacaaagaaactcacatagagccccacagagcccaggcccagggtctgagacctgtccaaaggccccaccgacgaccagccacacgccgggagagtcacctccttcccctggtctgcaccatcctgagctcccgagtaactcgagtggactccagggttgaaaaaggaaatggtcgtcccagatctgagagaggctgccaggctgggctctgggcctgggttggggcccccacactgggcccctcggccccccaccctcagccccctctggcttccccattggcagtagagagggagggaacttcataagtcacagagaggggctgaagaatacagagagtcagacagatggagatgggagaggcatagggagatgggagagacatagggagatggcagagaaagggagagacggggagatggggagagacagagagagatgggaagatggggagagaccacagggaggcagatgagaagaaagaaacagggatggggccagacacagagaaaggaaacttctttagtttccatcttcagttataaatgatgaaagagacaactgatgacagagacaaagttacaagagggagaaagagacagggggaagacgagggggaggggagacacatctgggggagaggaggaagaattggggtgccagagagagcaaggagggagaggaggccgatgggggaggagagagtaatgttcagcccagtgagggggtgtccctttcccccactgcaaggttttggggaagaagccagaggcctgaggccaagactgaggctttgagcggaaagaaggagggggcgagttattcacgaaacgcccgccttgccctgagtttccagaaggtgatgtggagtttccatccctcagcctgtctgcagacaggggtacccggggaggacagctggcccagaggagttgcgagactaaagtgaatgattgccacagtcattccctccggtggcttctccccaagtacttggcgccagagcgcccaacattgtgcatacatggtcgctcctaattcgtgggcccgggggacattatcagccttactttgggatattttaggagcctcggaatgcagaaagtggttttagcccagctggaggaaatgggccgaagcgggattcgaaccggcggattcgtttctctgcagcccggagccgcgtagccccgccccggtctccctagaaacaggcacccgtgtctccatagcaaccgctccatctgattgcccctccccgctcccagaggccacctagtgcgcaggcccgcctgatgtcgtcccacgccgtgccggctctcaggcgccggaagtgagctgcgcagcgccggaagcggcggacgcaggaggcctcgtggaggacacagcagcatgggacagtcagggagggtaaggcccggcagcttgggaggcaggtggcgcaggtggggtcccggccgaggtcgcggcgctgaccctttgtctctcgtcgccgcagtcccggcaccagaagcgcgcccgcgcccaggcgcagctccgcaacctcgaggcctatgccgcgaacccgcactcgttcgtgttcacgcgaggctgcacgggtcgcaacatccggcagctcagcctggacgtgcggcgggtcatggagccgctcactgccagccgtctgcaggtttgtaccccacccccagcccgcctccacccaccctcggcctagtcttcgtagctgcagtaatggctcccgctgtaaaactgtgggaggacttaagtctccccagctggaaaaaaagaccctcatggggagcatcatttctgcctttcagggcttttgctgggctggagtgagggcgcgcagcttgggagatagatagtcgcctaagcctgacagttaagactggaatctggagccgggcgtggtggctcatgcctgtattcccagcatttggggatgctgatgcgggaggatcacttgagcccaggaattcgagaccagcctgagcagcatggtgaaaccccgtctttacaaaaaatagaaaaattagtcggatatggtgttgcgtgcctgtagtcccggctactcgggaggctgaggtgggaggattccttgagcccaggaaattaaggctgtagtgaatcgggatcgtgccacttcactccagtctgggcgaccggaggagaccgtgttagaaaaaaaaagactagaatctggaggcagcaaagcagggttggaaactgacttctccccagtatctgatgcaagttacttaacctctctgggcctgagttcgctcatttgtcaatgggaagatgcgctgtgagcaagagacagagttagaactcaaatctgcgtccgactgactctaaaggctaagatccttttgctcctctgggcttgttgaaagggtcagatgcaagacagaccataacaggatctgcaccgtcagcttatagttgtcacaacaagggataagctatgttttctttttttctttttgtcatttccaggttcgtaagaagaactcgctgaaggactgcgtggcagtggctgggcccctcggggtcacacactttctgatcctgagcaaaacagagaccaatgtctactttgtgagtagacgccctcacccttcatctcccccagacccccccttcccctatctctcatgatgaacacatatgcctctgagctgctgtgatttctggcttcaaagtaaacgctctgaagaagagatggggcaaaggtgcctactccgggcacctctgctagacccctccagagtcactgatcttttcttctcctgcagaagctgatgcgcctcccaggaggccccaccttgaccttccaggtcaagaaggtgagaggggtggaggtggtacaaagccatgtggggtgggagctggacttggggttgtccgcagccatgtgtggttggtggtcaccccctcctctctcctgtcctacagtactcgctggtgcgtgatgtggtctcctcactgcgccggcaccgcatgcacgagcagcagtttgcccacccacccctcctggtactcaacagctttggcccccatggtatgcatgtgaagctcatggccaccatgttccagaacctgttcccctccatcaacgtgcacaaggtgggtctggcctggcgaggtggcaggtatgggggggtgcagcggatagaggtgccacaggccctcagatggattgctcactcctcccagcgctgagactgggagctcctgggtctgctgagtcctgaggtcaaatcccactcctgtgtctgatgatgctgggcaaaagtgtccagagattcccccagcggtccacaccccgtgagctgcaccttttccagccggtggaaagaaatactgatggagctctgtttcccacgtgtgttgagtgctgggctgagcaggatcgtagcatctcttcttagggccctgttttacagagggaagctgcgggcccagtgctatggcttcggcctgtaatcccagtactttgggagggcgaggtgggaggatcgcttgaagccaagactttgagatcagcctgtgcaacatagcgagaccccatgtctacaaaaagtagatttttaaaaagcccggtgtggcggtgcatgcctgtagtaccagctactggggaggctgaggtgggaggatcacctgagcccaggaggtcaaggctgcagtgagttgtgttcacgccactctactccatcctgggtgacaaagcgagacactgtctcaaaaaaaaaaaaaaaagcaaatctgaggctggcagagatgctaagtttagattccagggggcaggactggatttttaatttcatctggctcctgagtcctagctcctaatccttgtcactagtgactctcagatgggacttataaattatatataagatatcagtcatcagggaggctaatacggctctgggaccagaatttcttgtttaccttttttttttttttttgagacggagtcttgctctgtctcccaggctggagtgcggtggcacaatctcatctcattgcaagctccgcctcccaggttcacgccattctcctgcctcagcctcccgagtagctgggactacaggtgcccgccaccacaccccggctaattttttgtatttttagtagagacaggatttcaccgtgttagccagggtggtcttgatctgacctcgtgagctgcccgcctcggcctcccaaagtgctgggattacaggcgtgagccaccgtgcccggccttctttactttttttttaagagacggggtctccgtacgttggtcttgaactcctgggcacaagcaatcctgcagcctccgcttcccgagtagctgagactacaggcgtgcaccaccacatccaactcatttttccatctactttttgtagacatggagactcgccgtgttgcccaggctggttttgaactcctgggctcaggcagtcccaccacttcagcctctggagtagctaaaactgcaggtgcgagctggaagcagcatttctagccagtgccacagtccacgaacagtgtgtgtatcccccaaagcccccacttccccaaactttgccatgagtctactggactatgctctcttcctccccttccaggtgaacctgaacaccatcaagcgctgcctcctcatcgactacaaccccgactcccaggagctggacttccgccactagtgagtgtcccagcaggatgggagacgagggggtgccgggtgggggcctccacatgcggctgatgacagcacttctgctgagacgctgtgattgctctgtccaaagtaaacgccctgacgcactgtgggaagggtgagatgggcaccgccagccccatcacgtgccccctgaccacccccttgccgtccactcatgttcctgcagtagcatcaaagttgttcctgtgggcgcgagtcgcgggatgaagaagctgctccaggagaagttccccaacatgagccgcctgcaggacatcagcgagctgctggccacgtgaggagggcatagggcgggaggccactgcggcccggggaccccagaacaggaccgggagcctgagctcccccactgagccctgttatgtcctacacacaggggcgcggggctgtcggagagcgaggcagagcctgacggcgaccacaacatcacagagctgcctcaggctgtcgctggccgtggcaacatgcgggcccagcagagtgcagtgcggctcaccgaggtgaggcccagggcagggggacccccgggctccaccagtcccaacggtgggctgacgcttcttcctcgtcccctcagatcggcccgcggatgacactgcagctcatcaaggtccaggagggcgtcggggagggcaaagtgatgttccacagttttggtgaggccggggccgccgggggtggggggtcatgggtgtggagctgcacccggatcttggtgacccgcgtctcttggctcagtgagcaagacggaggaggagctgcaggccatcctggaagccaaggagaagaagctgcggctgaaggcgcagaggcaggcccagcaggcccagaatgtgcagcgcaagcaggagcagcgggaggcccacaggtccaggcagagctgggaagggcagggccaagggggggtccctgggatgggcggctatgttgacccccacgccctcctccagaaagaagagcctggagggcatgaagaaggcacgggtcgggggtagtgatgaagaggcctctgggatcccttcaaggacggcgagcctggagttgggtgaggacgatgatgaacaggaagatgatgacatcgagtatttctgccaggcggtgggcgaggcgcccagtgagggtatggagtggggtctgcagcagggcacccagagcctgtccttgtctctgggggccctgacactgtctctccccacagacctgttccccgaggccaagcagaaacggcttgccaagtctccagggcggaagcggaagcggtgggaaatggatcgaggcaggggtcgcctttgtgaccagaagtttcccaagaccaaggacaagtcccagggagcccaggccaggcgggggcccagaggggcttcccgggatggtgggcgaggccggggccggggccgcccagggaagagagtggcctgagcccaagccgcaccggagcagcggctggattgaacgccccagattggggcccgagatgtggccctcggtttcctttcataaaggagttgtgtccccagcccttccactccagtaaagaactgaattggccaggggtccacgtcagcgtttgggatgggggattctggagccatacaaagcaacccagagagtcctgggccggccacacccgagagtccctcccacctggtttcttcctggaagctgggtctctcccctaccctgcacggggttggtttcattggtggcagcagcagccatgagtggcccctccccccagtcccaccaaagagccgtgcaagcagacaggtcacactttcagcagatgagcttgaacctcaggagggttgtggcacaatgaggaaggaaacgtgggtggaaaggcacgctggcctgctctgctggctgggccagtaactggggatggggctggggcagggcccactaagccactggtgactgggggaggggctggggaactgggtagcagacacaggctgaggatcggcacgggagcatggcagccaacgtctcgggtaaggagaaggcatgttggctgtctctgggggtctgcagattgtcaggaggtgggggtagtgggtattggtaaaacacctaggtctggggctgggcacggtggctcacgcctgtaatcccagcactttgggaggtcgaggggggtggaacacgaggtcaggggttcgagaccaccctgaccaacaaggagaaaccccgtctctactaaaaataaaaaaattagctgggcctggtggcacatgcctgtaatcccagctactcgggaggctgagacaagagaatcacttaaacccgggaggcggaggttgccatgagccgagattgcaccattgcactccagcttgggcaatgagcgaaactccatctcaaaaaaaaaaagcctaggtcaaggctgggtgtggtgatgcgagcctgtgattccagctactcgggaggctgaggcagggggatcacttgaccccaggaggtcgagactgcactgagctgtgattgcaccactgcacctcagcctcggtgacagtgaaatcctgtctccaaaaaaaagccacgtctagacgacacttcctccttaagcaggctggcgttgggagcagggaggcgcctccggagaagcctgtccccagcctgcagaggcaggggtggggtgcacaaggagtgagtgcccctgtgctgctgtgccctgggcactgtggtgagcactggcaccagtaatgggtaagcaggcccccccatcctcccgaaggagggagatttttctcaccgtcatcaggtggcgcagggtatgggggaaaataacgcagggaagggagagtggaggcacgagggctgctgtcaacagtggttagggtggccttggggcctctcgcaggcaggaccacggacgtgggaagaggagcctcaagaatgtctgggtgtggctgggcacggtggctcacacttgtaatctcagcactttgggaggctgaggcgggcagatctgaggtcaggaattcgagacctcttggccaacatggggaaaccccatctctactaaaaatgcaaaatttaaaattaaaccaggcgtggtggtgggtgcctgtagtcccaaatactcaggaagctgaggcaggagaatcacttgaacccgggaggcagaggttgcagtgagctgaagtcacatcattgcactccagcctgggtgatgagagtgagactctgtctcaaaaaaaaaagtctgggtgcgaaggtaccaaggcacaagtctgcaagagcagccaggaagcctgggtgggctggtgcgagggagtgagtcgcggagcacagagggtggcactggggggtatggcgggcgggagcgctcttgggggaccttgtggggtgagtctggctttttggcggcaactccctggccaagtgtgagcacctggaagcaaaaggatggggcaggactccagcgctcgcgggtgctctctggtggccacggggagaagaggctttgggcggcggcgggtgccaaggtcagggcagagtgggggctggacccccacggggctttggacggcacagatctgaagtggagccggcaggccttgctggggctggactttggggaggaggcctctagtggggccaggtgtggtgggggagtagggtggccgctgtctgtgttaccagtggaccttgagctccaagactgcctggcccgcctaagctggtccattggggcccaatgcataaccctggctctgagcctcaatcctgtccacataaaggagtggagcccggtccccctccagggaggggaaagaactcgtgtccagggatccacgccatggcagacgtgggctcttggggtagcaggagccgccttatgggggaatagggctcagctggtgacaccttctgcccacaggtgccaagtcctgccctgccaacttcttggcagctgccgacgacaaactcagtgggttccagggggacttcctgtggcccatactggtggttgagttcctggtggccgtggccagcaatggcctggccctgtaccgcttcagcatccggaagcagcgcccatggcaccccgccgtggtcttctctgtccagctggcagtcagcgacctgctctgcgccctgacgctgcccccgctggccgcctacctctatccccccaagcactggcgctatggggaggccgcgtgccgcctggagcgcttcctcttcacctgcaacctgctgggcagcgtcatcttcatcacctgcatcagcctcaaccgctacctgggcatcgtgcaccccttcttcgcccgaagccacctgcgacccaagcacgcctgggccgtgagcgctgccggctgggtcctggccgccctgctggccatgcccacactcagcttctcccacctgaagaggccgcagcagggggcgggcaactgcagcgtggccaggcccgaggcctgcatcaagtgtctggggacagcagaccacgggctggcggcctacagagcgtatagcctggtgctggcggggttgggctgcggcctgccgctgctgctcacgctggcagcctacggcgccctcgggcgggccgtgctacgcagcccaggcatgactgtggccgagaagctgcgtgtggcagcgttggtggccagtggtgtggccctctacgccagctcctatgtgccctaccacatcatgcgggtgctcaacgtggatgctcggcggcgctggagcacccgctgcccgagctttgcagacatagcccaggccacagcagccctggagctggggccctacgtgggctaccaggtgatgcggggcctcatgcccctggccttctgtgtccaccctctactctacatggccgcagtgcccagcctgggctgctgctgccgacactgccccggctacagggacagctggaacccagaggacgccaagagcactggccaagccctgcccctcaatgccacagccgcccctaaaccgtcagagccccagtcccgtgagctgagccaatgatgtggcctagcggaagctgcctcctcaccctaggtgttgctggagaaccctgagggcagggcccgagccccgacacatcccttcccccaaaaagcaacacctgtgcttgcagccaggtcaggcccagctgcagcccaggcaggagcagtcgcctttcccacccacagcgctggccacagggctccctgcagggtcagggaccagaccacgcccagaggaggggaggcactggcccccgccacaggactggagacgcaagaacaaaaagaaccaagtagagagagtggagctgctttattgcccttggagcccgcgctctcggaggctgtcttctgtcgccaagggtcccggaccgagtacacagtggcagctggcttagttggtggacggcctggggtaggggagggtggcaggtataagacttctgggggcaccccaagaccccagacacccaagtggcatcttgggggtgggtgggcagaggacggggtaatgtgaggacgaagcgggcacggagccagatggccagtctccaggcctggtccacggactggcagggaccccaggcacaagagctgccacccctctgcccggttttggaaaaaaacaataaaggactgtcccctcaaaaccagccgggggactgttaaattggctcagggctattggttggcccaacactccgtgaaggtgctgggacaaggcagggagcaggggctggggcagggatggagtcttacttggcccactcgacgttgaggatgaggtggtcgtagccaaagccggacaccccggcaatggcacgcgcagcatcctcgcggcggtggaagctgatgaaggcaaagccctgtggaggggcgggatggggtcgggcacgagctaggacaggcgaccctaggacaagtgaccctcacacagccccaccgtgcctgcctgcctgcccaccttggattggccagtggtcttgtccttagccaggtagatgcgggagatggagccgaaaggccggaagagctcctgcaggtcggtctcacgcgtgtcctctgacaagttggtgacacggatggtggcgttgtcgtcggctgtgtgggagaggggaggtggctgtgagggggaggacactgcccagccctcgtgtgctgcccagccctcgtgtgcacgcttcggggataattacgaggtgccgggaggtgcccacccaccagcctggcgtcggggtgcccctcacctctgcggttgggctgcatggactccccgcggcggctggccccgtcgcgcaggctcggcggcacatacttccctgtcttgttctgcgtggcctgcaccggctctagctctggggaccaaaagacagtcaagttcaacctcactgtggcgcaggcgtggggacagagccgccccaggaagctcgggcttcagtgttgagccagcgcaggcactgtgtgccaaaccacaggcagccagttggccacgaggacaccaaggtgacacctgagaagctgacaccatttgagctcccagccagcgacactggtggaggaggaggaggaggagccccgaccccaccccagagagggcgggaggacaacaggggcagcagcctcacatgcacagcaacggcagacatgggacacacaacaggaacagcgcccaggtccccctcgcgtggcaggcgacaagtgcacgtctgcactctcacactcgccaccagcaaatcccaccaaagaattcggacggtacagccacaggcatgcaacggagacactatacacacagtgcgcacacacgatgtggggtggtcagcaccctggggccgacagacagcagctcatcaggacagtcacagggccaccagcaaagtcacagctgccaagtcgcacatatatgggagacgcccgtctcccaaccataggaggtacagccaattaggaaggcacagacgccccgaggagagtctggcaccatcaaacccgctgcactgtcgtgcgggagatgacagcacgaaggcagcagtggggacagaacccgtgcactgacagcaggaccctcccacccccacacctcccggcagcttctccttctcgccagtagacaggcccagctgctcggccagctccttctgcatgggccccagcgtatccttgtaggggcagcgggtggtccagtggtcgcccttgcagatgcggcaggacacgatcttctggcccttgagtttgttcatagggtcctcctcctcctggcagttcaggtcctggcaggggcgggttggggggagctcagaggcggctaaggcaccccctttgccccaccccaggatgccagccccacctgattgccccgcttacctctttgctggtgatgaacgtcatagagacatcgtcactgacagtggtggtggccacattgggtccgggggggtcaaactctgagttcccgaacttcttccagttctgggctcagggagggatgggggacagttgagggcaggggcaggctgggttccacagtggggtgccctagacctacaacagccacccccagagtgtctgggcctcaaaccccatcttcatcctcctcaagcactccctgaacagtcctggcgacagttgtttcctgagtacacgccaggcctgagctccaggaggcagggcagctgtcagcctccgggtccaggtgacagctacacagcgtggggcctgcgcagtctggcggaccagctcccaccagggcgcaatactcagggatgtgcaggggtccacctagacctccgggcccttgagctagacaacctgagcctcagcttcctcccttataaaacgggaaccacaaaagcttcctgcctccctgggctcctaaggagactgaatgagaaacacttcgtgcaaggtgcttggcatggggtatgttacaattaagtgcacagcaagctgttctaagtatacttattgctaacgcttcttccaaaaactgctgcgaccacctcctgcttccgttcctgcaggttgacaggccaagaggaataagaatctaaccgtggctgggcgcagtggctccctcctgtaatcccagcactttgagaggcgaaggtgggagatctctcaagcccaggagctggagaccagcctgggcaacatagtgaaaccccatctctacaaacaattaaaattagccggtgtggcagtgcacacctgtaatctcagctactcaggagggtggggtgggaggatggcttgagcctgggagttcaaggctgcagtaagctatgatcgtgccactgtactccagcctgggcaacagaactggacactgtgtctttaaaaaaattaaaagaatctaatttttattcgatatttacaatcgatgttatttgatatttattaatataatttgatatctatcatcgaactttgattagatatttatcatcatttatttagttgctatttatcgactgctgtgccttggacttttcagggccccaagacagtgcaagcaccccaggcctcagttcagcttcaacaaaataggtacaaagaggtaagcctggccgggtgcgatggctcacacctgtaatcccaacactttgggaggcctaggtgcgcagatcatgtgaggtcaggagttcgagaccagcctggccaacatggcaaaaccccgtctctactaaaagtacaaaaattagctggcgtggtggcacatgcctgtaaccccagctactcgggaggctgaggcaggagaatcacttgaacccaggaggcggaggttgcagtgagtcgagatcgtgccactgcacttcagcctgggggacagagcaacactctgtctcaaaaaaaaaaaaaaaaaagagttaagccccatctctaaacacaaagtccgggagcacggttttccaattcctctaggttagccctggggaagaagagcctcaccttcctccttgcgacagcctttgaagccttccgggtctcaatcctgaaggtgcggacaatctgaggatgggaggggagaagggtcaggctcctgggaccaagggatctcctttatcaacctcctcaacacaccccaccccattccggtctatgggcccccaagcacaagggtccccactccctgcaccccccaccctcaccttgaacttcttgccatcctcatctatcttgtactctgtcactgtctttatgtttccgttgatgacctccttgggaggcggcagtggagctggcagaaggggaaaaacagagaaagactgagccctgggtcatggggatcaggagcggcagggctggagggagaggcagcccggacaccgagtggcagtcctcactcacctcccggcagtcctcactcacctcccggcagtagctctggctctgggctggtgtcacctgtggccagagggatccccttgaggagctcgctggtgacacatttgtctgcaaaaggcagcgtaggaaggaggagtcagctccaggggcaggagctccccagctgcgatggaagggcttttgggatgacgcctacagcaaaagcggagaaaggcaggccaagggcagagggctggccaggcaacgcactgggatggccctgtggggactcggagtggcaaggatgggagatccctcgtaggaaggtgggtgccaggccatgaagccaaccaggcgccagtagagaaacaggagacgggagattacaacttcctccctggaggggaacagctgggaggcagtggcatgggaggaagagggacccgccggggaacacctggagttggcaacaggcgggtcccaaggaggatggcgcggggcaggggcagaccgtgacggggtacacggtgccagactgggagatggaagcaggcggcagtcacacggcttgggcctggccgcgaataccccgggcgaccgtgtacacttaccgtcctccccctcctcctccacctggtcggcccaactgggcttcgaactgcggaaacaaatgtgtggggaacgaagattaagtcagccaggcccggctcccgcagcctcggcgtacccaggccccataatacttcccagagcaccccaaccgcttcccgtgcccctttccgcgatcgccgactcactcaaagtctccagtaggcatcgcaaaaagtattctccacgcagcccaagcccggccagagagcggaagcgggcgaaaacgagacttccggtgccgccgtcgccgcctagaggggcccagccgcggcacccacagcgacacctgcggacggaggtggaggcgcacgcggctgtgtatgctactgggcgctgctggtaccagagtagggccagcgggggcagaggctgatttcagggctggtcctattaacctttaaaattaaaataggccaggcgaggtggctcaagcctgtaatcctcgcactttgggaggtcgaggcgggcggatcacctgaggtaaggagttcgagaccagcttggccaacgtggcgaaaccccgtcactactaaaaacacaaaaattaactgggcgtggtagtgcgtgcctgcagttccagctactcgggaggctgaggcaggagaatcgcttgaacccgggaggcggaggttgcagtgagccgagatcgcgccactgcactccagcctggcgacagagcgagacaccgtctcaaaaaaaaaaaaaaaaaaaaaattagccaggcgtggtggtgggcacctgtaatcccagctactcgggaggctgaggcgggagaatcgcttgaacccaggaggcggaggctgcagtgagccgagatcgcaccactgcactccagcctggggctgcagagtgagactccgtctcagaaaaataagtaaaattaaaataaataataataatcataaagctcacttattgagtgcttattgtatatgaagcatggtgaggaggatattacttccattttacagctgaagaaactgaggctcagactgggtgcagtggcgcctgcctgtaatcccgcactttgggagaccaaggcgtggggatggcttgaggccaggagtttgagacaagcctgggcaacatagtgagacccctgtctctaaaaaagaaaaaaagaaaaagaaagaaaaaagaaaccaaagttcggggaaaacaatccttttgcttaaactgttccttgtcttctttcccgatcccaatgattcagatgccaagtggcctcccctcagccactccctcttcttttctttgtagcattcttggctttccggtataattttgtgcatttacttgtttattgctcagctccttgctctaagcacaaccgtcctcagtcgaagtgattcatgatgactccccaggggaaaaaactggtcctcagggaggaaaaaaatcttagatattgtggtcttccaaagccagctctatcagacagcatttatccctaagtatttagtttctgcctttagggagatattaaatgtaattaaattgaaattaatttagttgatgtaaattcaattttaggataattcgggttttctcctaagaagggtgataatgaacaaaaaacgtttgacaatgtcggacgcagtggctcacgcctgtaatcccagcactttgagaggccaagatgggcagatctcttgaagtcaggagttcgagaccagcctgggcaatatggcgaaaccccgtctttactaaaaatacaaaaattagctgggtgtggtggcccgcgcctgtaatcccagaactttgggagactgaggcagaaggatcacttcagccctggaattcgaccagcctgggcaacacatagtgagaccccccatctctaaaaaacaacttttttttttttttttgagatggagtctcactctgtcgcccaggctggagtgcagcggcgcaatcgcggctcactgcaacctctgccttccgggttctagtgattctcctgcctcagcctcccgagtagctgggattacagatgaccaccaccacgccgtgctaatttttgtgtttttagtagacggtttagtagagacgggggcccacctcggcctcccaaggtgctgggattacaggtgtgagccactgcgcccggcccttaaaaaaattttttttttttaatcagctgggcatagttctgtgtgcctgtagtcccagatactcaggaggctgaggtgggagaacagcttcagcccaggaggttgagccatgatcatgcgactgtacttcagcctgggtaacagagagagaccctgtctcaaaaacacacacacgcacacacacacacgcaacaaaacaaaaaataacttgtaagggagaatgccctgagaaaaataaataagaagacaggaaaaaaaagtttatgcttttttatcctctgagttgtgagtgaggaggccactcaagtgtttggaatatcaccaacttttcttgtggaaaaaattattctagaagcctgtagagagccaagtggaagggaaaacattagctggagagcaggaaagagaggcacgccgctgtggcctttcaggagggtggcctggctatattggtgaaaatatgaagctggtccaaaggactgataaacatttttacaagcttactcaaatgtactctgagcaacacaaaatccaaacaacccagcagattgggcaaagcttcaaaaattcgatatcaccccgtggtagtaaagatgttatagggaaacaggctgggcacctgtaatcgggaggccgaggtgggtggatcacctgaggttaggagttcaagaccagcccctggccaacatggtgagatgccgtctctactaaaaatacaaaaaaaaaaaaaaaaaaatctggccatggtggtgggtgcctgtaatcccagctacttgggaggctgaggcaggagaatcgccattgcactccagcctgggcgacagagcaagactccatctcaaaaaaaaaaaaaaaaaaaagaggaagcgatatataaaatggcatatattacaggaaccaatttgtgtaaatcttcaacagcacatagatatgcagatatatgcaaatcatttcctggaaagaaagaatcagaacctgttaatgaggaatgctttggaaagaaggcaccaagaaaggaaatattatttttggacatgtattaatatataatatgcatttatgtaatatatgtgagatgtaacatataaatatatttcttggctgggcactgtggttcgtgcctataatcccagcagttttggaggccaaggcagaaagatttcttgagcccaggagttcaagaccagactaggcaacatcattgagaccccatcactacacacaaaaaattgctgggtgtggtaatgcacgcctgtagtcccagctacctgggaggctgaggtaggaggattgcttgagcccaggaggtcaaggctgcagtgagctatgattgtgccattacactctggcctgggtgacagagcaaaaaccctgtctctaaaaaagaaagaggctgagcacagtggctcacgtctgtaatcccagcactttgggaggccaaggcaggcagatgacctgaggtcaggagatcaagaccagcctggaaaacgtggtgaaaacccatctctattaaaaatacaaaaattacctgagcatgttggtgcatgtctgtaatcccagctactcaggaggctgaggcaggagaatcgctggagcccaggaggtgaggctgccatgagccaagtgctgggattacacaggtgtgagccacatcaaggtttgggtgcaagagtacatctggttatagattacagaagcataataccctgaccccattagatgttattttatgtgtaggaaaaggtttgaaccaggtccttttttttttttttttttttgagatggagtctcactctgttgcccaggctggagggcagtggcacaatctcggctcactgcaagctccgcctcctgggttcacgccattctcctgcctcagcctcctgagtagctgggactacaggcacccgccaccacgcccagctaatttttgtatgtttagtcgagatggggtttcaccgtgttagccaggatggtcttgatctcccgaccttgtgatccgcccaccttggcctcccaaagtgctgggattacaggtgtgacccacccgtgcccggcccaggtcctttttttcttttttcttttttttttgggggacggagtcttgctctattgcccaggctggagtgcagtggtgcgatctcagctcactgcaacctccgcctcctgggttcaagcggttctcccgcctcagcctcctgagtagctgggattacaggcatgcacaccaccacacccggctaattttgtatttttagtagagacgggggtttctccatattggtcagggtagtctcgaactcccgacctcaggtgatccgcctgcctgggcctcccaaagtgctgggattacaggcatgagccaccgcacctggcacgcctttttttttttttttttttttttgagacagggtctttctctgtcacccaggctggagtgcagtggcacgatcacagctcactgcagcctcaacctccccaggctaaggtgatgcccttgccctggtctcccaaaatgctgggatcacaggcatgaaccaccgtgcccagactcatttaaggaatatagtgactcgggcaagggacatggtgtgccctgtgctctgtcctgttttgtcttcaaagccttgttctgtagagctgcgcagacgtgtctcacgtgtctcagagtcaggggctttgtgaaattacgctggaaagcagaattgagcaaacccagcttaacattagttactttttctcacattttcacaacaaaatatcacagactaggaggcttaaacagcacacatttattttctcagttctggaggctggaagtccaagatcacagtgtcggcagggttggtttcttctgaggtgggggcaccttctccctcggtcctcacgtggcctcctctgtgtgtgtctatgtcccaatctcttcttctaaggacatcagtcatattggattagggcccaccctaatgacctcatttaaactttttttttttaattattttttttaaaggtgaagtctcactctgtagtccaggctggagtgcagtggtgcaatctcagctaatggcaacctccacctcctgggttccagtgattctcctgcctcagcctcccgagtagctgggtctacaggcatgtgccaccacacctggctaatttttgtatttttgtatttctagtagagacggggtttcaccaagttggccaggctggtctcaaactcctgatctcaagtggtttgcctgccacggcctcccaacgtgctgggattacaggcataagccaccacacctgggtttaattttctctctaaaggtcctgtttctgctgggcacagtggatcacgtctgtaatcccagcacattgggaggccaaggtgggcggatcccttgaggtcaggagttcgagaccagcctggccaacatagcgaaacccctgttgtctactacaaatacaaaaattagccaggtgtggtggcaggcatctgtaatcccagctgctcgggaggctgaggcatggcaatcccttgaacccgggaggcagaggttgccatgaaccaatactgcgccactgaactccagcctgggcgatggagtgagactccttttttttttttgagatggagttttgctcttgttgcccaggctggagtgcagtggcatgatcttagctcaccgcaacctccacctcccgggttcaagtgattctcctgcctcagcttccctagtagctggaattacaggcatgtgccaccatgcccagctaattttgtatttttagtagagacggggtttctccatgttggccaggctagtcttgaactccaaactcaggtgattcgcctgtcttggcctcccaaagtgctaggattataggtgtgagccgccgcacccggccaagactttgtaaaaaaaaataaaaataggccatgcgcggtggctcacacctgtaatcccagcactttgggaggccgaggtgggaggatcacttgaggtcaggagttcgagacgagcctggccaacatgatgataccccatctctactaaaaatacaaaaatcagctgggtgtggccaggcatggtggctcacgcctgtaatcccagcactttgggaggccaaggtaggtggatcacctgaggttgggagttcgagaccagcctgaccaacatggagaaaccctgtctctcctaaaaatacaaaattagctgggcgtggtggcgcatgcctgtaatcccagctactcaggaggctgaggcaggagaatcgcttgaacccaggaggcagaggttgtggtgagccgagatcctgccattgcagtccagcctgggcaacgagaaggtaactctgtttcaaaagaaaaaaaaaaaaaacagctgggcgtggtggtgcgtgcctgtaatcccagctactaaggaggctgaggcaggagaatcacttgaacccaggaggcggaggttgcagcgaaccaagattgcgccattgcactccagcctaggcaacagagactccatctcaaaaaaaaaaaaaaagtaaatagagataaaaagaaagaaatactaaattgatggacatgcagatgtggtaacagccaaaaaacaggggcagaaaggagacgtggcaatgtccttactgtggtttttctagggaagtagatgggcacctcagccttacatgtttatttcatttaaaaaacagccttccactatgaactatggtatggtggttcctcaaaacattaaaaatagaaccaccaaatgacccagcacttccacatctgctttatacttacaagaattgaaatcactggagaccagcctgggcaacagagtgagacgccatctttacaaaaaataatcatatattaaaaggaaaaaaaaagaagccaggcacggtggcttacacctgtaatcccagcactttggaaggatgaggagggacgatcattggagcccaggagtttgagaccagcctgggcaacatagcaagaactcatctttactaaaaataaaaataaaaattagttaggcgtgatggtacatacttgtagtcccagctactccagagactgaggttgggggatctctggagcgaaggagttcgaggctgcagtgagctatgatcgcatcactgcagtccagtctgggtgaaagaacaagaccctgtctctaaaaagaaaagacaaggtttctaattcttacaccaaaatacatcctcaagttgttcttggtgaaggatcgtatacctgaaaatgtgaccactgaaaaagtgggattaaaaacaaggaaattcaggccaggcgcggtggttcacacctgtaatcctagcactttgggaggctgaggcaagcggatcacccgaggtcaggagttcaagaccagcctggccaacatggtgaaaccccatctctactaaaaatacaaacattagctgggtgtgatggcccatgcctgtaatctcagctactcaggaggctgaggcaagagaatcccttgaacccaaagatggaggttgcagtgagcagagatcgcgccactgcactgcagcttgggtgacagagtgagactccatctccaaaaaaaaaaaaaaaaaggaattcaacaagttggttagattcaaaaaacacagtttacaaaatcacagccaatacaaatggagcatctctccataggcaaaggaccatggtttagaaatcaagaaaacatcccatttatattagtaatgaagggactaaatacttaggaatcaagttatgaagtctgcaagatctggatgaaaagctgtggacacaaaggaattcctgaacaaacaggacaaaccctgttcttagaaaggaaggcttgtcattaacatgtcaattcttccagaagtctgcaaagttaatgaaatccctataaaacacctgcttgacttttagcggctgtgccagttctaaagtttcaatccagtcattcaactcctagaaaagtagcctagacgtggatacacatgtgtatacaaatctatgtccagccatccctcggtatccccaggggattggttctaggaccccatgtggtaccaaaatcagaatgtgctcaaatccctaatataaaatgtcataggccgggcatggtggctcacacctgtagttccagcactttgggaggctgaggcgggtggatcatttgaggtcaggagttcaagaccagcttgaccaacatggtgaaaccccgtctctactaaaaatacaaaaaaattagccgggcgtggcggcacatgcctgtaatctcagttacttgggaggctgaggcaggagaatcacttgaacccgggaagcagaggttgcagtgagccaagattgtgctactgcactccagcctgggcgacagagtgagactctgtctcaaatataaaataaaataaaataaaataaaatggcatagtatttgcatatacgctacacatattctcctgtgtacactactttttgacagagtcttgctttgtcacccaggctagtgcaatctcggcttaatgcaacctccacctgctgggctcaagtgatcctcccatctcagcctctggagtagctgggactacaggtgtgtgccaccatgctcagcaaatttttgttattttttgtagagaaggtgtttcgccatgttggccaggctggtcttgaactcctggcctcaagtgttcctcctaccttggcctcccaaagtgctgggattacaggcatgacccactgcgcccggcctctcctgtgtactttatgtcgtctctagattatttgtaatacctgacataacgtctacacgttgctttattctcatggattccatgtagtacttggtaagtggcaaatacaagttttgctttttggaactttgtggaatttttctgaatattttaaatctgtggttggttgaatgccagaggtggaacccttggatacaaaggcctgacctgcatcacaattcaatctactgctcttgagactgtagttgtttccaaacaatataaagaaaaaaagttcaaataaaggctttctaagagatttattgtataacatagtgagtatagttaatatattcttgtccaggcgcagtggttcatgcctataatcccagcatttggggatgccaaggcaggtagatcgcttgagcccaggattctgagaccagcctgggcaacaaagcgagatcctgtctataaaaaaatataaaaatcagctaccaggcatggtagctcatgtctgtaatcccagcactttgggaggccgaggcaggcagatcgcttgagcccaggagtctgagaccagcctggccaacatggcgaaaccccatctctactaaaaacatagaaattagccaggcctggtggcaggcctgtaatcccagctactcgggagactgaggcatgagaatagcttgaacccaggaggcagaggttgcagtgagccaagatcgcaccaccgtactccagcctggtgacagagtgagattccgtctcaaaaataaataaaaataaaaataatgattagctgggtatggcggcacatgcctgtggtcccagctactacagaagctgaggtgggaggatcacgtgaggccaggagtttgagaccaccctgagcaacacagtgagaccccatctccacaaaaaaaatgtaaaacttagctgggcatggtggcatgcgcctgtagttccagctactcaggaggctgaggcaggaggatcacttaagcccaggagatcaaggctgcagtagaacatcgctgcactccagcctgggcaacagagcaagatcctgcctctaaaatatatatatattttttttaaaaaggacaaaactgatacacatattaatgacatggatgaatcccaaaggcatttatgctgaaagatctgaaacacaagagcccatgctggcctgaacaggcaggtgtcatctatggagacaaaactggatgggaggctgcccagggactgggaagggggagatcaagtgggaagaggcacaaggtgacctgaggtgacagagacattctctatcttgataaggatataggctacagtgctatgttcacttctcgaaatttaagctgaacatttaggactcgcatatttcatattctaccccaattttcaaaaatagaggaacaagagagattcctaggtaagacaaccttcgaggtgcaagacagtttatttttttttcgagacagtctcgctttgttgcccaggctggagtgtggtggtgtgatcgtggctcactgcagccgccgcctcccaggttcaagcaattctgcctcaatctcccaagtagctgggattacaggcatgtaccacacctggctgatttttgtatttatactagagatggggtttcaccctgttggccagggtggtcttaaactcctgacctcaggtgatccacctgcctgggcctcccaaagtgttggaattacaggcgtgagccaccgtgcccggcccaaagcagtttatttttgagacagggtctcgctgtgttacccaggctggagtgcagtggcacaatctcggttgcagtgagccgagattgctactgcaacctccacctcctgggctcaagcgattctcccacttcatgctcctgagtagctgggactacaggcacgtgccaccatgtcccactaagttttgtaaaggcaatcttaatagacactatcaccaggcgtggtggctcacgcctgtaatcccagcacttttggaggccaaggtgggtggatcacctgttgtcaggagtttgagaccagcctggccaacatggtgaaaccccatctctactaaaattagctgggcgtggtggtaggcgcctgtaatctcagctactcgggaggctgaggcaggagaatcgcttgaacccaggaggcggaggttgcagtgagccaagatcatgccattgcactccagcctgggcaacaagaccacaactccatctcatttaaaaaaaaaaaaaaattgacactattggctgggtatggtggcagatacctgtaatctagcactttaggaagccaagcgggaggatcgcttgaggccaggagtttgagaccagcctaggcaatatagtgagactgcatctctacgtaagtaaaaattaggcctggtgtggtggctcatgcctgtaatcccaacactttgggaggctgaggtgggctgatcacttggggtcaggagctcgagaacagcctgggcaacatggtgaaagcccgtctctaccaaaaatacaaaaattcgccaggcacacgcctgtaatcccagctacttgggaggctggggcaggaggatcccttgaacccgggaggtagaggctgcagtgagccgagattgcgccattgcactccagcctgggcaacaagagtgaaactccatctcaaaaaacaaaacaagaattagctacatatgatggtacagtcctgtagtcccagttacacggaggcaggggatcacttgaacccaggaggtggaggttgccatgagccgagatcaggccactgcactccagcctgggtgacagactgagaccctgtctcaaaaaaatagaaaataaaaaaagataataggtacatgggtgattgttttctcacaaggtcacactatgcattagtacaaagattcagttgtcttgatcaaggtgccttggaatccagaaaaagaaaactcattatactcattatatactttaaaatgaattttttagcttaaaatagcagcagaaagtatatttaaaaaaaaatctcggatgggggaactttaccatatgtcaagctgagctgttgtactttgctgtgtgcatttgctatcagtcttattcaaaaaataagctgagatccccatttttagtccttacaaaagtgattcatgtgttaaaatgggaatgtcagaaatgtggaagaagatacatgtttaagatctcttgctggggggaggaaaggcgtttctaaataggctacaaaggccgggcacggtgactcatgcttgtaatgccagcactttgggaggatcacttgaggtcaggagttcaagaccatcctggccaacatggcaaaaccctgtctctactaaattaacaaaaattggccagatgtactggcaggcgcctgtaatcccagctactcaatccctgctacttgggaggctgaggcaggagaattgcttaaacccgggaggcggaggttgtggtgagcagagatcacaccactgcactccagcctgggcgacagagtgagaatccgtctcaaaaataaacaggctacaaaaaactaagagtgacaaatataaattgacttcctaaaaatgggaggtctctgtatggcacagacatgataagccaggatgactgagcaggggcagtcatcccaaatgcccagggagctcccagcaaagacagtcatgtggccatcacagagaaacggtacatccagtggccaaaggacacacagaagtgttatgtcactattaaaaaatgctggccaggcatggtggctcacacctataatcccagcactttgggaggccgaggcaggcggataacctgaggtcgggagtttgagaccaccctgaccaacatggagaaaccccgtctctactaaaaatacaaaattagttgggtgtgatggcgcatgcctgtaatcccagctacttgggaggctgaggcaggaaaatcacttgaacctgggaggcggaggttgcagtgagcagagatcgtgccaccgcactccagcctgggcaacaagaacgaaactgtctcaaaaaaaaaaaaaaaaaagctaatgggaggctgggtgcagtggatcacacctgtaacccagcactttgggaggtccaggtgggcggatcatgtcaggatttcaagaccagcctggccaacatggtgaaacatcgtctctactaaaaatacaaaaattagctgggcgtggtgatgggcgcctacaatcccagctactcgggaggctgaggcagaatttcttgaacccaggaggcagaggctgcattgaacggagactgccccactgcactacagcctgagcaacagagcaagactgtctcaaaaaaaaaaaaaaattctttggaaagaaaaaaaacccaactaaagaggttttgcttggggatggggtggccggggctccaagggcagctcagtggtgacttctctctccttattccaccagttgcagcacagagctctgcctcatggtcacaggatggctgctccactgccaggcatcacaacccacttcagaccaaagaaggcctaccagccacggggaaggccagccaagacttcctttaaaaggctttcctggaagctacactagcaagttccatttgcatgtcatggggatcaactcacgtgactcagttctgaacaaacacagacagacacacggagtgtctagcttcaaacgtgctagcttcaaactccacgtgggtcgccttcagcatggaagagcttgttcctgtctgacctcagccagaagtcccgtgcaaatcacgaatacccacccagggtggtttataggagagatttatttgaagaaatattacaacatataaaaactacataaagtcttaatttccactcatacagtggtagatttgatataatgcataataaaaaacttttaaaatccagaatgcacaaagtactgcacaatttgatcactaaatcattagttgataagcgaacctcacacaacagcttcatgtcagccaaggccacaaacaccatgtaccacacatgtgaacggacagattgacatgttaaaaacacaacatcagtgcatgttggggattcctggtgccagaaacaggggtgacgggagggcagaactagtccttagcagcttcctcctcctttattttagctgaagggaaataaaaggaaaagtcactctggggaacacgcccggtgtcacgccacttgacaggcgagtaacagacatggaccatcaggaaacattaacgtactgatgttaacagctgacccaataagtggcagagtgctaagggaacgttcacggagactgaacactcctcaaacggtccccagagggttctagacccagaggctcaagtgagcagctgaggcaggtgcctgctgagccaaattcaccgagcaggagtgagggaaacggccccagggccagcccagcagccaacctgaccaaaggcctgctgtgtgcagcacgcctgctctaagcacttgacacgtgcaactcactcaatcctcacagcagccccttgagaaagatggggccacgaacgtgggtaggtgacccgcctgagtcccagagcccaaaacggtggccagcaactgcccccacatgtacccccagagggcagtcaggccccagaggaagcctggcccaccccaccatacctgaggcactctctcgggctttggccaacatacaaagcttgatctccaagccaatggctttggccaggggcggtggcacggcattgcccacctgcaggaggggagaagggcaatgcctgatgtggacacccaggcccaaggcccgggggcaggtgtactgccagcccctgctcagatggaggacaacctgggcattgcaccccttggggaagggttctggtcctgctcacatgggcccaaaacccttccagcacaagatccttggaccctccaactggcccatcatcccgccccacagccacaagtcactgggcctttgaagagcttcagaaagacttgagacaaagacacgtggggctgggagcagtggctcacgcctgtaatcccagcactttgggaggccaaggcaggtggattagttgaggccaggagttcgagagcagcctcgccaacatggtgaaaccccgtctctactaaaagtacaaaaactaattagctgggcatggtggcacatgcctgtaatcccagcacctcaggaggctgaggcaggagaatcacttgaaccctggaggtggaggttgcagtgggcagagatcatgtcactgcactccagcctaggggacagagtgagaccctgtctcagaaaaaaaaaaaaaaaagacaaatgggccacctagacacgtttcgctcccagttaagagtggctgcttccctggccggcgcagtggctcatgcctgtaatcccagcactttgggaggccgaggcaggcggatcacctgaggtcaagagttcgggaccagcctggccaacatggtgaaaccccatctctactaaaaatacaaaaattagccgggtgtggtagcacatgactgtaatcccagctactcaagaggctgaggcaggagaatcacttaaaaccaggggggtggaagttgcggtgagctgagatcacgccacttcactccagcctgggcgaaagaacaaagctccatctcaaaaaaaaaaaaaaaaaagagagagtggctgcttcccgagaaccagattcggggggaggggtgaaatgtggttttcacaagaaccgtggacactggtttttaagcaatgcgcgtgccctatgatgaaaatacacttaactgagactaactcatagactaacttgttaagccaacccgacacctgagaagcaggtaggaattaaggtgctagttcatttgaacctacagcgagtgagctgtcgccaccatgggttttagcctgctcctttagcgcgacggactgtccttctggctcaatctctgcctcaaaaacaaacagtaaggaaccagcatagggacgcagcctgactcggatgtctcagcactgtccctcctgtgggccgtcttcccactgagagtgatggggctacccggcagccagcaggcgtcctcccggaagtgactgcgctggccccagccccacctggtgacaggcacagaagcctccttcctgtccagacccagcgggcgccgccccactgacctgccggtgcttgtccaggatgttgccgaagagccggtaggtgtcagggaagccctgggagcgggcacactcccgcacgctcaccacacggtgctgctctgggtggagcacgcggccctgggggaaagaggcgcggtgggcgagggcagtagcacccaggccgggtcaccgtcggggacagggagggaaatggcactgtgacagcatacggccatggccttggcctatgagcttgtcccgtggacgtggaggggcaggaggcagaggccaggtgcctggggtcctggggtgctgtcccccacttggctaaacccacacttccacctagttaggccgccaagtacagggcctgacccaggccctcggatgccccctccccacctacctgcttgcccatgggctcggggttggtgacggttgtgctgaagaagccgtcccactcgagccttccatagaggccagcccagtggttgtgccggttcccggtgtggggcaggcaccaggggatgagggtgttgaactgcctggctgcggggtcgcaggctttgccggctggaagacaggacagtgatgaggctgcagttgtgggatggggtataggcttgggacagtggctcttagagctttgggaggcagagatggcacctcctgtgcaaggggccccctggggtggagcagccaacaatcctcgttctctgggcactgtttttattattagtattatatgtctcgctctgttgcccaggctggagtgcaatggcatgatcttggctcactgcaacctctgcctatggggttcaagcgattctcctgcctcagcctcccaaatagctgggattataggcgtgcgacaccacgcccggctaatttttgtagttttaatagagatggggtttcaccatgttgggcaggctgatctcgagctcctgatctcaagtgatctgcctgccttggcctcccaaagtgctgggattacagaggtgagccatcgtgcctgacctgcttttattatttatttattgttttttttttttctttttagagacagggtctcactctgtctcccaggctggagtgcaatggcacaatcacagctcactgtagcctcctcaacctcccaggctcaagtgatcctcccgccttggtttcccaaagtgctgggattataggtgtgggccatgaacccagcctgcttttactactcaacatggtcagcagctaccttctctgggacacccaggcttggtgtgtctgtgccctgccctggcctccaggttcacaggccaaaggcccagggctctgccttccttcccctcagcccaccgggaaccacaacttacaggacccaccttccacgcaggagcagaccccacggagggccccagagctgctgcggccgttcttcctgtcatggtgggtataccgcagcttcctggccatggtgccgtctgagagccgcacctcgatgttgggcagatcgcgccagtctgaccctggggccaaggggatgtgccgcatgcgggcagccaccaatgcactcatgtcctgaaagagtgtggggggcccagctgtcacctcatgtgagcagcatccgagcatccatggtgggctgggagctgggaacaccatggtgaccaggaagccccctggggctcacgcccatcgggaaagagacagtcagggatatcgcacttggctcgaggccacggcagggacctgaggcagcgcaggtgtaggagagcgtgggaatctaagctgagcctttagggtgggggaaggggagtggtgccaggggatggtgaaagggctggtcttggcatcctgggaaaacatgcggggagaggcagcaagggggaaggcagtggtgggtgggcagtggcttgacaccattccagaccaagtccaggactgcgggagctctgacacttcccatgaccatgcaagagagaccaggggtcacacaaaggctgaggactcgggaggaggagcctgggatcagattccatgtctcccctgagtcttgggcaggctgactgttcccacgaggctgctgggctgggcctcgaggaggagccgctctgtcagggtgccattaccttacagatgtggtccctgaggatgggctggtactgtgcgccccggagctgcctctggaaccaggactgaggctccccgttgtaggagatctccagtgccgaggctccattccgcacctccggcaggtcggacatcgtgtctcgcaccgtgatggtccggaaaggacccgagctcaacctgcaacagaggaggaggtcaacacctctggagatgcacgcagcagctgtcccctcatcacaggtgccaccccctgcctgctcagatggccttctcccgagatcacagcactgcccgaggtcacatgggtggcagtgtgcctggatgccatctggaaggggggatggggctatggcgtgggctttgtggatgaccacagccaagcatgcggctggccgctctgcacatgctatctactagggaagcagatgatgcagggtcagaactggagaccacaggtggcagagtgccatgtggcagagcaccgtgtggcagggcagatgctgtaccatcctctcctccccaagcctcaccagggagtactcacgggccccatgagctactgaggcctgctcggcagtgtgtggaggagcgacgggggccacctacctggttatgttgctcacaaacttcttgtcatccaccaccacgctcagctggcaggcccggggagcaaacacgtgcagtggctccgggaacagagggagcttctctccaggggccgcggccaggatgatggcccgcctcctagtctgggccacgccgtactgaccggcctgtgggggagaaggacggacaaccccaccgtcagtgggacactcccaactggactggccagacccaggcccagggtcagcagcctgagtcgggagtggctggccaatgcggagtgcacttgcagaaatccccagttacctcagcaggcgtgctcctggtcagaggagtttggagcagataaagaacaaaagcagctgagcccaggggacagccactggggaaggtgggagcaaaccctgcggggaagtccggccagctctgaaagcactgcaagggccccaaggtcttagcactcggggagaacactggagaccaggagccctgtcgcttccctgatggctgtggtcacaaggacagagaacgtggctgcaacaagtcttgtctggtgagcctgagtcgccctgaggctgagctaggggaccgggtagccaagtgcttgcccacttaggcagacatcctgtgctagcatctggatagctgtttcatttttaattatgccctcaattgctgagctgatacagagaggatgggggatgcttttcagataaggcctgggccccacagactatgtccatccctgtccctgcagacacagccacctggagtgcaaccctcggccatctgtgggggtttgtgtgcgcagttacccagagcaaaactgtcttttaaaccaatcgaacagctgccgcctacacatggctctgcgcacctcacttcccctcccgctctgtgcagactcagccattccacagtgctccatggtgggctgctcacccttccccatcgagggaaaggagccaggagctgcatggcgagaagcccattgtagccagccctcccaggcatgttcgagaacacagctcaagagacactagcggtggacttgctgggggccggctgagcacgcatctcccctgactccgccagtgggacagagcaccatgccagcctctgctgcctggatggcaggcctatgccattgaaccctgccttcagtaagggatggctggctgctggccgggtcacgtgctggccacatctgtctgcccgccccagccccagggcccacctgcagcacgccgaaggtgcactgatagcccatgcggaccaggcagcggagggtgagcttcaggaccatggagcgcttgaaggagacaaagttcctgacattctccaggaggaagaaccggggccggtagtagtcgcagtagctgtagggggcaggagagactgcaggagtcacctccacagacagagggaagaaacgacccactgtgccggaagcccctcacgaatgttatcaaagtctctccctggtgagagctgagctgtgagcttccggggggcagaggcctcagtgcagggcgaaaatgaccactgctgacatgcggcacagccccgggccgtctggcaacactggggggcttctacccgtttacctgaggaaggaaaccaccagagagtttttgaacttggagtaggtgcgcgaattgaagcggttcatgccgctgaagccctggcagggcggcccgccgcacagcatctccacgtctcccttctggggcagccgctggccgcgggagttggtggtctccccagccatgaccagcttcagcaggatgttgcagtcctctgtgaacactgtggagccggggttgttcagccggaacgcctgggccgcagggtcccacatctcgatggcccacagcgtgtcagagatgcctggcagatcaagcacgaagccatgctttcaactctccagaagatttttttttttttttgagatggagtctcgctctgtcacccaggctggagtgcagtggtgtgatcttggctcactgcaagctctgcctcccaggttcaagcgattctcccacctcagcctcctgagtagctgggactacaggcacacaccaccacgcccagctaatttttgtattcttattagagacggggtttcaccatgttggccaggatggtctcaaactcctgacctcatgatccacccacctcggcctcccaaagtgctgggattacaggcgtgcgccaccgtgcctggcctcggaaggagattcttgagtcaggaaggtgaccggggttggaagtcgtttcaggtagcacctgcccggtctgggctcaccaggtattcagagatggagcctacgggcgctcacctgcttggtggaatccctccgacaaccccccgcagccagaaaacacatccagggtccgcagcttgggcagcttgatctctatctctggctcgctcggctcacaggcttgggacttgggcttgcccttccctgggggagagaggccagaggctaaacccgatcctcagagtccaagtccaccttgctctcaagcgccttgttaactcaggcggcctcgctgtcccagagtcagtaacaccagaggtggttttacactgagggattcacaggcagcctccaagttacagaagaataacttgaaaagaaactcatacaatgacgtaccttttcccttgcccttccctttgtttccagggctacgggcatggttgggaggatcttcaaagcttttgctctttgcattataggcctgaaaaggagagaactgcaatcgtttgggagagaaacgcactgtcccctctctaacgcagactagtaagaaggcaatttgatagtcacttaatttctccctcagtggggccatgaccaattagccaccaataagagtagtttgactttgctacaatagaaacttaaaacaatccattttattaatactaacatttgatctggctgacactgaaatgcctattacaagcacttgagagtaccttctagaacaggaaaaagtgctatgcagaatctgctgtccaattgggctacctcatccatgcctgggagaacgtggatgtatcgttttaaggtaacaacacggaaaggccaagccccaacaatttacaagtcatgagcttgatcagctgactcgtgggccctctccataacgagggccacccgcacaggcatgtgggctgggcctggacgtaggcgcctggcccaagggacccaggagcaggggcaccttctccaactcatactaagacaccagtcaggctggtggaagctgcctcatggtcctcaacgttcagttgcaccaagacactaaaacgttaggttctctaatgacgtactttttaaaaaccaggagtgttaaactccgggaccacttgaatctcatacaacttgtgctctggagaaccctgctcagacccccgtaaagctcctgcagaacagcttcacgtcagccaaccacccacttcttacaaaagctgaaaccctgcagccaagccgccttgtgtataacccgacatcagactccttctggccaactttgaccccgaagccttccctctagcaagcaggggcaccacctcgaggaagtagaagcggttggggccgcccatggagtacacctggacgcactcgggcaggtcctccccatactccacggtgcagcggccctgcacagccttgaagtccaccacggcctcctcgtcgctccagtagagcaggttgatgtctgcgtggtagctcgctggagtggacttgtgggtgttctcaggcctgcgagcgggagaggcctcgttaggagctctcctttgtggtgagcttatgctgaattaaacagtaccatgttcctggggtgctcagggaactgcagggtaaagaccccctagttcgagaaccgcagggtaaagaccccctcagttagggaactgcagggtaaagatatctcctccccacactggggaactgcaaggtagactcccccccatttagggaactgcagggtaaagaccccccctagttagggaaccacagggtaaagatcccccaagttagggaatcgcagggtaaagacccctcccagtaagggaatcacagggtaaagatatcccctcctcacattagggaactgcaaggtagattcccccacaattagggaaccgccaggtaatgacccccgacccagttgggaaccgcagggtaaagaccccccagttatggaaccgcagggtaaagacctccccagttagggagtcatagggtaaagacccccctacttagggaaccgcaggtaaagataacccctccccaaatgagggaactgcaaggtagattcgcccccaattagggaaccacagggtagagaccccccaaccattaggtcagcttggctgcttgctctgcacgcctggccctgccctgctgtgtccgcctgccggtagcagcctctcgagtgtgtttctctcacctgtaccactcacagcccttgttttatttcctgttattacaaaggcttcaggaaatctttgatctatgttagctaagaggtgaggcaagtgtatagcttcctgtacaggctagtttcaggttaatgcctaatcaccgcaagttactcgggtcttagaaaaagaaaacgtaataggccaaaagcttaggaaagagaaaaaatcccagagacagaaaggaggacctgggaagaggtggggacagcgggacagaacctggacagtcatagatggagcttgggaggttctctgggggtgcccaggcactctacccgttttttcttttgagacggggtctggctgtcacccaggccggagtgcagtggtgggatcatggctcactacagcctcaaattcctgggtttcagtgatcccttcagcctcagcctcccaagtagctgggattacaggcgtgtgccaccacgcccagctagtctttttttttttttttttttggtagggccggggtctcactacgtttcctcaagctggtcttgaactcctagactcaagtgatcttcctgcctcagcctcccaaagtgctaggattagaggcgtgagctacagtgcccagccagcttaaggatttcttttggaaaaagggctctgcaacattaaaataaggacctaaaagtgagggctgggaactagaattctagtcattatcagtgcccaccgataatcagaaacacttggaaaaacagctacttcaacctaactcttagaacaactgtgggtgctatgccacaaccttgtttcaggcagagccttctagaagagtctgtggcctcgtggaagaacagaggcctctgctgacctgtagaacttgttgacccggattttgatgtcagtctcattgggcctgccgttgctcttcttgggacagaagatctctttgatccggccaattcggtagggctcaggggcatccaggttgctgcctttgatgtagtcggagtatttccggtagtgctctgggtacaggtcctcatccacgggctccttccgtgggcgtttcacgggactggacagcttgatgctgcagagaagcacccacttgacatcaatgaaccttccaccttgcagtggtcagtcaggcatgactgaccagtgaaaataaccatttaaagtcaagcacctgatgaattaaggtaggtgtgtaccctaagaaatgatttaggctgggcattgtggctcacgcctgtaatcccagcactttgggagaccaaggcaggtggaccacaaggtcagaagttcgagaccaccctggccaacacggtaaaaccctgtctctactaaaaatacaaaaattagccgggtgtggtggtacatgcctataattccagctacttgggaggctgaggcaggagaattgcttgaacccaggaggcagaggttgcagtgagctgagattgtgccactgcactccagcctgtgtgacagagcaagactccatctcacagaaaaaaaaaaaaaagatttagctgcagatttagtctcacagtttgaagcacgcattcaccctctgcgcattactggctacggtggtggctgacactgctcaaataccccaggctcctgcctcccgactacttggcatcttgtgtttcctggcatgtgacgtgggcagaagtgaccaaagaggatgtcactgcctggggaatgtcctgtgtgctttcccttgggctcaaacactggcaacttctgactccagcggcccagatatccaagggacacaacaggtggagtcctctgctgacctgtgatgggcacctcgtatgagcgagacagcggctaccgtggtttttgttgagagagtttcactctgtcacccaggttagagtgcagtggcacaatctcggctcactgcaactcctcctcccaggttcaagcgattctcgtgcctcggcctcccaagtagctgggattacaggtgcccaccaccacacccagctaaccctggctaatttatttttagtagagacaggtatgtcggccaggctggtcttggtcttgaactcctgacaggcatgagccaccgcacccagtccagcttctgtggttttaagtcactgtgatttggggttgttgctatgatacaacctacgctaccctgactaaggctctgatctagaagcgacactggaggccaatgtaaggcgccacagggcctgggacaatgggagtgtggtctgactagtgtggaaaagctgttctttgaagaaggcctgccgttagggaagtcagctgtcacgttctccccactaggccccccaggagtctgacgggccccaaaggcgtctctgtgctgactctcccactttgccaggagcaactggcagaaaacactacggggaggtgtccccttcccaccaaggacaaccagagggggtaacgcgccccaactgtgccaaggctggagggaacctgcttctccagttctcataattcacagtaactgaactaaggcaagggagctggggctctaaggaaatggaattgtgagccgggaaggcatctggaaaacgttggctgtaattccaaccacacgctgattcttagaaaaaacacagaatggatcagtgtggaaacgatctgtggctttaggtttttcctggaagagcctcgatcctctgacacagagaagtcatctgatgtgattccctctaaccaagaagtaactcatgtccgttaaacctttactttaagccaggtactgtatggagcactttcaactcactcaacccttcgagccccagcaggcaagatcccactctcccacttcacagtaggggacggagaggaggtgtccttgggcagaggcagaacttgggggtgggcccccagctgtccctcgcgctttatccagtaagttctttttttttctttttttattttgagacggagtcacactctgttgcccaggatggagtgcagtggcatgatcttggctcactgcaacctctgcctcccaggttcaagtgattctcctgtctctgcctctcgagtagctgggactacaggcgcgcaccaccacacccggctaatttttgtatttttagtagagacgaggtttcaccatgttggccaggctggtctcagactcctgacctcagatgattccccactgcctcggcctcccaaagcgctgggattacaggcgtgagaaaccacacccagccaaaccagcgagttgacttttacgctcagctttgctctgcaatagcatcatggtcagtctacacgatttatgttgtctgtttgccacctatgccaacgtgacggctaggacaacagctggtgcggagggattggcaatgtctgtaaggagggggacaccacaaagccagcctggctcagcctggagcgccctggccccggctgctccgagggggcacttacttgaacgtgaaggcctcagggggcaggtacacaccatcaccaactcggtacaggatgccgttcttggtggctgagtagtagaggacccggctatccaggtcctcgagctgctccaggaccctggggatttctttttgcctcatctcagccagacgggcacagctcacacagaatctgaaggaaacaaagggacagaaacataaggccctgaggtggccggcagtggccgcagcagctactgccagcttaatccagagactctggtaaccaagaggaaaaaacatttgcagatgctagaaggaagaggtggctttcttgtgctttgtgttgacattttgaaggcacttatttgagaccaaagcccagagagaacatagcaagaaaatcaggcaacttttgagtcattgagacaaaaaccctaagatatcaatgaacagggtctagaatatggttaagaacacaccacgagcaacagtcccgagtggctcagtgaggaactcaatccagcagagactcctactgttctctccataaaggctcaacaggtatttgaggaaattcaacattattcttgactagtaagcccttaaaggagacttgaagatggccttaaaaatagagatcaaggcccagcatggtggctcatgtctgtaatcccagccctttgggaggccaaggcaggagggtcgcttgagcccagaagtttgagactagcctggccaacacagtgagaccccgtctctacaaaaaatttttaaaacattaaccaggcagggtggtgcatgcctgcagtcccagctactcaggaggctgaggcaggaagatcacttgagcccagcaggtcgaggctacagtgagctgtgaccacaccactgcattccagcctgggtgacagagggagaccctgtctcagataaataaataaataaataaataaataaataaaagaggttgggtgataaataaataagtaaatgaggttgggtgcagtagttcatgcctgtaatcccagcactttaggagcctgaagggagcagatgacccaaggtcaggagttccagaccagcctggccaacacggtgaagccctgtctctactaaaaatacaaaaattagccgggcatggtggcaggcgcctgtagtcccagctacttgggaagctgaggcaggagaatcacttgaacccaggaggtggaggttgcagtgagccgagatcgtgccactgcactccagcctgggtgacaagagtgaaactccatcacaaaaaagtaaaaaataaaatgaaaatagagatcaagccaaagctagcacgagacttatgggagaagcacagatgcccccggggagccctcttggcctcctgggtttccctggttgccacctgctcctctgggggtgctggctgctgcttttagttgaaacaagtgaggtacggaggttaaaaagaaggcatggggcattggacattaaaaaataaaagctcgccgggcgcggtggctcacacctgtaatcccagcactttgggaagccgaagcgggtagatcacctgaggtcgggagttcgagaccagcctgaccaacatggagaaaccccatctctactaaaaatacaaaaaaagtagccgggcatggtggcccatgcttgtaatcccagctactcaggaggctgaggcaggagaatcgcttgaacccaggaagtagaggttgcggtgggccaagattgagccactgcactccagcctgggcaacaaaagcgaaactctgtctcaaaaaaaaaaaaaaaaaaaaaattaaaaaaataataataaaataaaataaaaaataaaagcttccctcaaagcagtcacccagttacaaaagaatcgaggacaggtgtggtggctcacgcctgtaatcccagcactttgggaggccaaggcgggcagatcacaaggtcaggagatcgagaccatcctggctaacacagtgaaacctcgtctctactaaaaatacaaaaaactagccgggtgtggtggcaggcgcctgtagtcccagcaactcaggaggctgaggcaggagaatggcatgaacccaggaagctgagtttgcagtaagccaagatcgcaccactgcactccagcctgggcaacagagcgagactccgtctcaaaaaaaaaaaaagaaaaaaaaaaaggaaagaaaagaatcaaataagaggtctcatttacaggagaaaatatctaagaaacagccaaaaacatgcaagagctgggcacacactgaagaacacacgggaagtcttgaaatggcaagacgaaccctgttcctgggtagggaaccctcttacaaagacaacgccaggtcatccacacacttaaagcaactccaggccatctacacacttgagcatcattcatagtcaggctggcctttgacgagcaagagacacaaactggggggccgttggcggaagccaaccagacggaagcacacgggaaaagggagtgatgtgggctgaaagtgcctgctgaccccgagtccagccccagtgctcacttgaacttgttgtcctctgttggctgggtttttggaggggactcgaatctcgcgtagtcttgatcataccacagctggtagaagtaggtcttcccgtcgtccccctccagcagggactcgggatccatgcctcccttgggagataagaatgcgtgtcaggccaggcgcagtggctcatgcctgtattcccagcactatgggaggccgaggcgggtggatcacctaaggtcaggagttcgagaccagcctggccaacatggtgaaaccccgtctctactaaaaatacaaaaaattagctggacgtgatggtgggtgcctgtaatcccaactactcgggaggctgaggcaggagaatcacttgaacccaggaggtggaggttgcagtgagctgagatcatgccattgcactccagcctgggcaacaagagcgaaactcagtctcaaaacaaaaaaaaaaacaaaaaaaaaaccaaattaaaaaaaaatacaaatcaaaacaaaacagaacgcacgtcagcagtgaccctccacgataaggcaggggctcacgagggacaccaggcactcacctccatggcccagttttcggagggggctttgtagatgactttcactttgctgtggatatatgaaagctgcatgtcctcacattcatccaccaagaacagctccagagggtccgacgtggccccgaggactgtgtctgtcccagcgcagaaccagtgggcgtgaaacatctgcccgttgctgctgtcctcccacagcgccgtgaccctggaatcagaagacgggcatggggagaaagttctgacttggccagcagatatgtgaccaagtctatgcaggagcactcgtccttttcagttttcatctagggcaaaaagctgctggtgctattttggcaaaacaggcatctcctacttgatgagaaagtgcatgcagaagtcaagcaaaaagaaagatgcaaaccttgctagatacagcggttttgaggaatcatctggaataacagagacacagtcccccacttccagggtttccgcatcaatgcacaccttcttatagtaactcttcttcccatcagtctgaaaatgagagcataagttcatggaggatcattctgagggtctttgctggccttgacttgcatggtcctctgttacttaaagtaagacatgactcgatttcattaagaagtcaatgaagagttgctgctaaagagaacatcctgttctacaagggcttcaataataagaaaaaagaagaacatccaccttccttggccagatgctgtggccaagggcatccatgtccctcccacttctgctctgccactcgggtcccaggatttgattttaacagcacagcccacaatacctcaccatggtctgtaaggccacagcctgaaccctgacccctgtcctgcccatcatcccctggctcaagccactccagctgcaggggcctccttccttttctccaacaaagtaagctgactgccacctcagtgcagctctcccccaggtcgtgtggctaggtcctacctgaccttctccatctcagcccaggtgtcacctctgcaaggcctcgtggccccagcctcctcccagccccctaccctgcagaggcactcatgccatgcagcagtacccatgtctgtcctcctgcaggggctcagccacggcccaggcagccagcaggtggcaagcctcataattaagtgaactgattgcatctttaatttatggacgtcagagaagcaacacagaggatactcactcctctctctcacactgtggtaaaggaactgaccttcagtgaagccaatgaccacagaacggatgggaggccatctgttggtgccccaaaaagacccaccccacaccagagggggctgtgacagctctcttggaaacaagctatgaggggccaggcacagtggctcctgcctgtaatcccagcactttgggaggctgaggtgggtggatcacttgaggccggagttcgagaatggcctgggcaacatgatgaaaccccgtctctactaaaaatacaaaaaaagttagcctggcatggtggtgcacgcctgtaatctcagctattcaggagggtggggcaggagaatcgcttgaacctgggaggcagaggttgcagcgagctgagatcgtgccactgcactccagcctgggtgacagagcaagattccatcttaaacaaaacaaaacagaaaaacaagctatgagggctcacctgcctgatgcccctagaactgtgtcaaatgcccattttgggacattaggagaactgagccttgtggccacacaaaaatgccttgctggtactgagccatggaacatggtctcttggccagtcccgctcttctcaggggcaaacagacaggtttcttagtgccggggctcaggctgcctgagaggtcaggttggcgagatactagagggcaacctgcttattgggaacatggcagtgagctgaccaaggggctccaagggttaccttgacggcttctccgacccaagagatgcgattcttgttctgtttcttcttcttcccctggtgcatttttttgggtgacggcatctctgggatgttatcatcgacttcctcatcgtcatctgcctccttcatggccatattgggacacctgcaatgtcactggttatacctaaggccccttttctaagtaagaccaaccggggctgttttcttcataacagggacaggtcctgagacaatgcctaacgaaggaatcctggtgctgtcccacacatgcaggcccttctccacagtgcatctgccaccagctggcaagtcctctgccacaggaggaagactcggcctgacctacctccgctcttggcaagcctgcttgctccgtccactgccaccaaatttaaccatgtccttgcaggctttacatttcccacactcaggctgctgacacacctaaaaaatggcattaaaaaggcaaatcagggctgggcacagtggttcatgcctgtaatcccagtatttcagaaggccgaggcaggcagatcacttaaggtcaggaattgcagaccagcctggccaacgtggtgaaaccccatctctactaaaaatacaaagattagccaggcatggtagggtgtgcctgtaatcccagctacttgggaggctgaggcaggagaattgcctgaacctgggaggtggagattacagttagccaagatcacaccaccatattccagcctggacgacaagagtaaaactccatctcaaaaaaaaaaaaaaaaaaaaaaaaaaaaaggaaaaaaaaagggcaaatcacacagcccttactaacaatgagacaaatgatgcattaagacttttaggtctcaaaaaattaaaaaaaaaaaaaaaaagtgagtcacacagcccttagcaacaatgaaacaaacggtgaattaagacttttaggctgggcatggtggctcatacctgaaccagtacattgggaggctgaagcagaggtagatggatcacttgagtccaagagttcaagaccagcctgggcaacatattaagacccccaactctacaaaaaattaaaattagccaggcgtgtgacaaattcctgcagtcccggcaactcaggatgctaaggcgggaggactgcttgagttcaggcattcaagaccagcctaggcaacatggcaaaatcccatctacaaaatgtttttttttaattagctgggcatggtggcgtgcacctgtggtcccagctacttgggaggctaaggtgggaagatcacttgagcccagtaggttgagaatgcagtgagctacaatcatgccactgcattccagactgggtgacagaacgagacccatctcaacaacaacaacaacaacaacaacaacaaaaccaagacttttaaaaatgtgcctatttggctgggtgcagtgcctcatgcctctaatcccggcagtttgggaggccaagacaggaggaccacttgaagccaggagtttgagaccaggcaaggcaacacagcaggaccctgtctctacaaaaaaaaaaaaaaaaagcaatattcaacctcattagaaatatggtaagtgagagaaataaaattcccttcccattctccagatgggttaagaagccagataggtggtgtgaggaaagaagaacgcacactgctcaaatggtaagttggtagaaccattttggagagcaatcttctagatcaaagttaagaatacacacccacaacccagcaacgctacttctaagcagatacactcgcgagaagctttgctcaaggatgctgccacatatttacaatactgaagaggtgcctatcattgaggagtaagttaggatattcatttaacaaaatactacagaatatttaaaatgaaataactagatctaccagtatcaacacgtaacagttacacaaataaaaacaaatgattttagggctgggcacagtggctcacacctgtaatcccagcactttgggaggccgaggtaggtagatcacttaaggtcaggagtttaagaccagcctggccaacatggtgaaaccccatctctactaaaaatacaaaaaaaattagccgggtatggtggcgggtgcctataatcccagccactcgggaggctgaggtgggagaactgattgaacccgggaggcggaggttacggtgagctgagatggtgccactgcactctagcctgggtgacagagagagactgtctcaaaaaaattaaaaaaaaaaaaaaaagattttagaagttataaaacattggacacacgtgtgttaaccaagaaaaataaaataaaaccaaaataacaatggtgaggacatgcaggctcctgttaagagatgccagcggggatcaaaagcaaagccctgaagccagtctttatccaaaagaaagtcaggtaataggtatcaaaatagtcctggtctttgggtcataggactaggaagttagttcctcctgagtgaagtaaacatatattttaaaaactcacagaaagggacgcctcctgagggcctcaaatctaagctggacaaagtgcccacttagatgtgaatacccctttagcagtccaacaggggccttcagactgtgagatgcaggcacagcagagccacccagaagccaggctcttcaattaaggacagtggcattatcagcaaagcacccaagcatgcctctgtggacatctgtcctattgacgttcaatgaagtatgcagggtcctcccagaccactaactaatttctgtctcaggggtcacatttgagcagccagagtctcaagccacagagagaaagatggagcagtcctcagatcaggccagaggctgggccaccttaggggagcgggagcacccacaggtgaggttacctcacagacgccacatcgccggcgcttaaaggcgttctccttgtcttctctgtcatccttttcaatttgctctgcgaagaaagtatcgaagatctggtagaccagcttggtggtggtggctttcgtgggtcccctgtccttctccctggtagaatgcctgatggtctgccgcctcgcctgggctcgcctacgggagaggttccagcatctcagaggactgggacagaggatgtgggccatgctctaccctccccggtctccagtcttcactctggtccctgccgcatccttacctctgtcccagcgtgaccccagccagcttgatcaggtcccgcatgcagggtgtcaggaagatgggctgctcatcactgtccccggcctcgtcataactctccacctgctccaccacaaactgcgcgtgtcgcaggagggagtcctctgtgaagcggttcaagttgaggccagaaggaggaaccgtggtcttgaaagagaacaggtttctctcatgcttaagccaaactggcctaaatccaactgaagaacagtgtctgctggttctgaaggcaagtttccagtgggaatcccggatgctgaggaccctcgatctcttacctcgatcttgttgatcaggtcctcataggtcgagtcggaattgctctgcaggaactccaccacaatcttgctgatgtagatcttctcctgcatcagcccaaatatgggcgcatactcgggactgggatccatcagaatgtattcggcaaatgctggggtgaacagaggaggtgtggaaaaggggctggaatctgatggcgcctacagtggccacagggcatggaggagtctaccaaactcacccaacagtctaaaagtcatcccgtacccaaatgtcagaaacatagggcacaacacatcatagctggcttgttctgaagaagcctgtctgagccagccagagagcgaagactagctgagtaggccttcattgagctcatctctggtgtttggaattcagtctgggtttgggttgcaagaataagacctgctcttttttttttttcaggggaggacagagtcttgctccgtcacccaggctggagggcagtggcgtgatctcggctcactgcaacctctgtctgctgggttcacgtgattctcctgccatagcctcccaagtagctgggattacaggtatgcaccaccatgcgtggctaatttttgtatttttggtagagagggggtttcaccatgttggccaggctaggctggtctcgaattcctggcctcaaatgatccccccaactcggcctcccaaagtgctgggattacaggtgtgagccaccatatccggccaagacctgctcttacaactggagagtcagttccagagccagtcataactaacacaagaggctaccccaactgaacctgctaaggttcccagtcacatggccttctgcaagcctgctgagaattcccaccagagccccgtcagcccccaggaaggagaacatgaaggcccctttcagaccccggccagcctatgatgggccacacacttacaggtgctgaagccgatgagggccttttcacctccatcaaagccagtgatccaccattcatttatggggccaagatttttgccattaacaccacctagagcagaaaaaggaaatggactaaaggctctgactcacatcccaaacccaggaggcgctctaagcgcccactcagcagacatcccatcagccaggtcgggtgctcctcagtcatcacaatgacttggcctacagctgctcctggcacaaagtctcacaccctaactttaagaggcagcagcaactccagctgactattgcttcataagtatgttttttatttatacatatatataagtatatatgtatactatatatatatgctatatatttttttttaatagaggcaggctcttgctatgttgtccaggctcgtctcaaactcccgggctcaagtgatcctctggcctcagacccccaaagtgctaggattacagatgtgagccaccctgcctggctgtttttaaagtgtgccccaaacataatcccggactattccttaccttcaagagatgggtcatcatcatagattggttttgctgaaccagaaaagaagagttcgatattcttctcgatgaggccggtgtcgatgggacacaggtgaccgtgcttacagtacacactagacaggaaacaaagcacatgcttaccagctaagccgtgaaggcgggtcttcgtgcagacttcagatcaggcacgaggcaatgagagaatgtacaagtctgacactctttttttgtttgtttttgagacagagtcttgctctatccctcaggctggagcgcgatggcataatcttggctcactgcagcctccacctcccgggttcaagtaattctcctgcctcagcctcccgagtagctgggattacaggcctgaaccaccatgcccggctaattgttgtatttttagtagggacggggtttcactatgtgtagcaggctggtctcaaactctttatctccagtgatctacccacctcagcctcccaaagtgctgggattacaggctgaaccaccatgcctggccccgacactcattttttggttgcgggaacactggattaagacagcgttctatcacccagagtttctaccttattctcccacctaagcatcaagtgtatgtgtgtctgcaacagcaacaccaaaagatcagtcagacttacagtgcgggaaataccggtttctagaacaccttctactatgcagtgcagccactagctctattcagctgcagaacatttctgtcactcaaatgttaataaagcctcattcccatcaagtagcagtcactctccagtctcctcccaaccggccctcagcccccagcccccggcaaccaccaatctgctttctatacctatgaattcacctattcaagatacctcatatggttaattttatattatacgagttagacctcaatttagaaaataaagcaggttatagaacagtgtgaaaagggatgtgggaaggaaggacttctgcctccttttgggcataaatctcaaacacctgcggccccactgtccagatgccccttgacattcgggagcacgttctttagtgaagacagagaggcaagatgtcaaactcaaggaaaaagacatgaactgggtgttctgcttacaaacctgctcatctagacaaggaccaccctttcccggccaaagatgctgggctatcctcagagcccccatatgaagtctgcacaggtctctggagagcaccctccaccacactcacccagcttagtgccttggaagccagaaaggctcaaacaaaacactgcatacctcctgcggagctcccctactgcgtaccaggcatggcagacagaataggttgcagccctgcctcaggatgtaaggcccagaagaagagacagagagatgaagccagcgtggatcaagggagggcctacagaagagggggtcccgctccccgctgcacaggtgggctggaggctctctccataggggagacatgggagagaagctctaagccccaggcaggggcaggacccactggttggtaggccagaccccacccatgactggcttctatcgccagtttcaagccaagtacagcagtatggagagcccctaaataactcaggcagtccagctccagtggacagaaggcatgtgacttctggaaagtgtcctccaggccaccatccaccctccaggaacgaatctatgatagatctcaacttagggaggaagctgagacactcaggactctggcagccccagccccaggctcccccaagcctttgtccctggtgaaggccagagtgaggccctcgggcatggttgccagctctgcccaccacagcacacctcactcacaccagcaggcagaggtgtgtggccctgctttgggccaggcctcggggggctagcggttgctggtggacgcaacagcatcttgatctagatagaaggatcccatagaaggagagggaggggaacaaccatcagccaagcacggggaacgtgtgggtgccctcccagtgggtacaggaaccgctgcctgggggtgcttccaacaggggtccccaaggcacttccccctcctcttcacagagagggaaaataccacccaggcctaaaaggaggcagggccgttcctggagctgaggcatttcccacgaagaacaaggtgaagccctggagggtaactgcacccgcagggagagggagcaaaatggggctggggatgcctgagagcacagggcctctgcccactcaagagctgacgtgagcctcggtgaaggtacgggccggacgccaggcaccttccctcagaggacaggagagtcagtgctgaggcctgcaaggccctgtgtggcccagccccaacccagcaaccaccacaccagactcaccattcaccttccacagctggcacaggcccctccgagccctggtaatggtgtccccttctacctagggtgccccaccccggccatcccctcggcctcttctctcacaggccatcaaggtctttactgaaaatcattacctctcccgtcttcacagaacttcctcctcccacttattctctctgcatgtcaccaggcttttaaaatctgtcgtggctgtcactacccgacaggtatcacccatttctggctccgtgaaggcaggacctgagcagctacatccacgacacctagatcactggtacctagcacagagtaggccttcatctgagcgtgtgaccctcaggatgtgggcagaatggaggggtaatatgtgtagtgtaaaaacccaaaaaccaaaccaaaaatcagcaaagctctattgtcccttcatcagctttccacgtggctctttgagacggagtcttgctctgtcgcccaggctggaatgcagtggcaccacctcggctcactgcagcctccgcctccagagttcaagaaattctcctgcctaagcctctcgagtagttgggattacagtcgcgtaccaccacacctggctactttttgtattttcggtaggtttcgccatgttggccaggctggtctcgaactcctgacctgaagtgatctgctcacctcggcctcccaaagtgctaggattacaggcatgagccaccgcgcccagccctccacggtggctcttatccacgaagtgttagcttaagacatgttgcaggtcaggcactaaaaaacatcaccagaatcgtgagcccgcaggcacctctggggatgtgcctccttccacgaagcaaacatgcacacgaaagtgcacttacctgaagcaggtcagtttgtgctggggaagcgcctcataactctcaaagccagactcgttggcatcaaagatggacagcttctcatttgtcagcatctgtggctcatccacctgaaggacacggggctggtgagcagtgggacaagggacaggcagaggaaggctgggaagagagctgtacgtaccgcgtctggtgggtgctgcccatatttgaggtcagggtcgtccaggtactgcccgcactgaatgcacttgggagggtgggtctgtgggagcaggaacacagatgatggcactcagagagcagctcccagccgcctcgtgagcgccgccaccggctttattcccggcagatgtttaccttggagttcatgactgttttggcgcgagccatttttttctccgttctgggggaaaaaaaaaaatcacaagatcgtttgtttaattgtttcagaaaatatcaaaatcgcccctgtgaggtttctgcctgaggtgcctgtggcacagggaggcaccggctgtggcagtgaggcccaggcgcgtggtcacagtggctcttcaccgcaggggcatcctgcctgacgcaccttggtcctatgttcaccaacccgatccaaaatgagcctaaggttgctctggcaattactgaaaccccttcccttttgttctagaaccatcattttaacattaccatctgctttcgataatgtcaagaataaattcttacggttctttgggggtcgttttgcgtctcttctcctcctacacagggaaaacaaaagaggattaaaggctaagagagtgttttacacccagatagtgcttcggtgttaagaactttgtataagtgattatcataaaacagagagaaggggagggaggcagtgagagggccagcaggtgagctctgactcactctaccatctaaagtcatagaatacaaaatcttatagtcaggcccagcacagtggctcatgcctgtaatcccagcactttgggaggccaaggcacacagatgactggaggtcaggagttccagaccagcctggccaacatggcgaaatcacgtctctaccaaaaatacaaagattagccaggcgggcacttgtaatctcagatactcagaaggctgaggcagaagaattgcttgaacccgagacgtagaggttgcagtaagcagagatcatgccactgcattccagcctgggcgacagagtgagtgagactccatctcaaaataaatgaataaataaatctcataaccaaagacttcctgaaaagatttagaggaaaagccaattttttaaaaccttagctttcctgtgtaagtggacacctcaaggtaaacaaataattggccaggcacagggccgggcgcgatggctcacgcctgtaatcccagcactttgggagaccgaggcggatggatcacgagatcaagagattgagaccatcctcgccaagatggtgaaaccctgtctctactaaaaatacaaaaattagttgggcgcggtggcgcatgcctgtagtcccagctactcaggaggctgaggcaggagaatagcttgaaccagggagacagaggttgcagtgagccgatgtcgcaccactgtactccagcctggcggcagagcgagactctgtctcaaaaaacaaatacataagtaaataaataaataaataaataaataaataaataaataaataactggccaggcacagtggcccatgcctgtaattccagcacttgaagaagcccaggtgggaggactgcttgagcacaggagctcaagaccagcctgggcaacacagtaaaaccctgtctctacaaaaatagaaagttaactgggtgtagtgccatctgcctgtagtcccagctaccttgaaggcccaggtgggaggattgcttcagcccaggagtttgcggctatggtagctatgactgtaccactgcactccagcctcgacaagagtgagaccctgtctcaaaaataaatactaaaatgtaaaggtaagcaaacaattgatgagggggtatacagaccgagtcatgtcccctgcaaaattcatatgttaagactaacctgctatgtgactgtatttggatgtagagtctttaagagacaattatggttaaatgaggtaataaaggtggggccccatccaataagaccaatgtccttgtattttttgttgttggttttgagacagagtcttgctgtgtccccagcctggagtgcaatggtgtgatctcggctcactgcaacctctacctcctgggttcaagtgactctcctgcctcagcttcccaagcagctgggattacaggcccctatcaccacaactggctaatttttgtatttttagtagagacagggtttcaccatgttgtccaggctggtttcaaactcctgacctcaggtgatgcgcctgccttggcctcccaaagtgctgaaaagacaggcgtgagccgctgtgcccagcatttttttttttttttgagacagagtcttgctctgttgtccaggcaggagtacagtggcacgatctcagctcacagcaatctccgcctcctgggttcaagcaattctcatgcctcaggcttccaagcagctgggactacaggcatatgccaccacgcccagctaattttgctgtgtccccagcctggagtgcgatctcggctcactgcaacctccacctcccaggctcaagcgattctcctatctcagcctctcgagtagctgggactacgggcgtgcaccaccatgcccagataatttttgtatttttagtagagacagggtttcaccatattggtcaggctggtcttgaactcctgacctcatgtgattcacccgcttcagcctctcaaagtgctgggattacaggcgtgcgccaccacgcccagtcttctttttcctaagaccagcctgggcaacatggcgaaaccccgtcttggggaaaaaaaaaaaaaaaaaaaagaaagaaagaaaagtgagacctttaccttttcatcctcgtctttttcatcagaaatctgtggatttactttttcaggttctttttcttcgggcctccgtttggcagctctgcagggtgaacagatacacagcaagtagcagcttagaaacactaaccacatcgccaactcgcacggaaagtgacaaactaatgcctccccatgggaaagcaagatacccatgggagctctataggcacactgccagcttgtcatcccgagacgaggccttcagaggccccagggtccccacacatctacatcaccacaggtttctagaacaggcttttttttttttttttttttgagacagagtttcactcttgtccaggctggagtgcagtggcgcaatcttggctcactgcaacctccacctcctggcttctagcagttctgcctcagccttccgagtagctgggattataggcacccgccaccacacccagctaatttttgtatttttagtacagacagggttccaccatgttggccaggctaggctggtctcgaactcctgacctcaggtgattcacccacctcagcctcccaaagtgctgggattacaggtgcaagccaccacacctggcctagaacaggctttctactgatccagatgacacaaaagcacaagcattttaaacacttacagatctttgggttgacttctgtgcttcttctcatcctgacagaaaaataagggggaggtagagagataaagaagggaaaaaattagtttctgagccagagtgagataaaatgcaaacactgaagttacaggttagggatcccagcactgtggagctggaagacaggcaggcctgggcagatctaccgggtagacacgaggcttcactttccctcacttaattccccacctgaaactaacaagagggcactaaagaacctcctagaccagggcttggcaaactgtttttgtaagagccagaggatcagtattttcagctttgctgaccacgtggtctgtgtcaggatgatcatctctgctatggtagcacaaaagcacccacaggcaaaatgtaaatgagaaagtgtggctctgttccaataaaactttatttacaggctgtgtgcagtggcatgtgcctgtaaacccagcactttgggaagctaaggcaggaggattgcttgatgccaggagttcgaggccagcctgggcaacatgctgagaccccatctctgcaaaatatactatatatatatatgacacaggctggtcagctcggggggccctgcaccggggccaacagctcctaagggctgacacaagctcctccccaggttcagaggacaggctgcctctcctgtcttcactgcaggaagcccagagggcatttactactccaggactcaaggtcttcaggaacaccatcaataccccatctgaatgttggtcagagatgccagtggtttaatacaaaaagcagcatatatatatggttaatatatacatatatatggagagagagagagagattgattcactcttgttgcccaggctggagtgcaatggtatgatcttggctcacctctgcctctcaggttcaaacgattctcctgcctcggcctctctagtagctgggattacaggcattcgccaccacacccagctaattctgtatttttagtagagctggggtttcaccatgttggtcaggctgatttcaaactcctgacttcaggtgatccgcccacctcagtgtcccaaaatgctgggattataggcgtgagacaccgcgcctggcttacaaaaaataagtttaaaaagtagacatccatggtggtgcatgcctgtagtgccagctacttgggaggctgaggtgggaggatcacttgaacccaggagactgcagtgagctatgatagcaccactgcactcctgcactctagcctgggaaacagagcaagatcctgtctcaaaaacaaacaaacaaacaaacaaacaaacacgccgggcgtggtgcctcacacacataatcccagcaccttgggaggctgaggcaggtggattgtttgagatcaggagttagagaccagcctggccaacatggtgaatccctgtctctactaaaaatataaaaattagctaggcatagtagcacacgcctgtaatcccagctactcaggaggctgagacaggagaatcacttgaacctgggaggtggaggttgcagtgactcgagatcacaccattgcatgacagagagagactatcttaaaaaaaaaaaaaaaaaaaaaaaaaaaaaaaaaaaaaaaaaaaagaacaaaccaaacagactgaatgcaacggttcatgcctgtaatcctaccactccgccactttgggggactgagataggtggataactcgagtctaggagtttgactgagaccagcctgggcaacatggcaaaaccctatctctacaaaaaattaaaaaaaaaaattagctggacatggtggtgcctgcctatagtcccagctacttgggaggctgaggcgggaagatcacctgagcctgggaggtcgaggctacagtgaaccgtgattgcaccactgcattccagcctgggtgacaaagcaagaccctgtctcttgggatgggggacagtggctcttagagctttgggaggcagagatggcacctcctgtgcaaggggccccctggggtggaacagccaacaatccttgttctctgggcactgcttttattattattaccatattatttttttgagacagagtctcgctctgttgcccaggctggagtgcagcggcataatcttggctcactgcaacctctgcctcctgggttcaagtgattctcctacctcagcctcccaagtagctgggattagaggcacatgccaccatgcccggctaatttttatatttttaggtgacaccggatttcaccatgttggcctggctggtctcagactcctgacctcaagtgatccacccacctcagcctcccaaagtgctgggattacagtagtgagccaccatgcccagccctcacatccctttctaccatgaggcaaaagtgctggcagtgtgagctcaggcccctgccagtttccaatagagggcagggagtaatgtgactactccagtctgaaggagtgctgacagtaaggtgaccaacatttggacagaagaggtgagggatgggaggctggaggcaataccaaaggctcccctgctatggggtggggatggaagcccactggcgaccgggtcagaagtgagggtgcttgtcacccagcaagcccgtgaccttgggctccactctctagattgtaacaggcagaaacccagagaccctcttggggtcttcggcatctcttagatagggacccgccgccccccaccgatgacctagctcccttccctagagttcatgcaggagggcctgcaggcaacctggccatcctgtactttgacagaggcccagcagtgttccacatgatgctttagggtttaaacgcatgcacttggctaaactagactggggaggctggcagggggagagctagactcagaacgtaggaggctgggaaagaatcaaaggtgtggctgacatgtgcgtcagagctgactgtgtgtcaaggcttctcagcagtgaggcctcaggagaggatgcttcatgcacatctcagcccaggctcacacagaccctctctagtgtgaaagacagaggacaactgagtgttcactaggcatccagcacaggcatccagccacaaatcccggcccccaaaaggaggaaaaggtgaccttcccagagtctggatggccccatggagcctgggtggatggggctggacttgaacccagagccccaccctgcgcactcccgcccaagcaaacaggagcagaagaatgagggggagttcagaaacaaataacccgcctttactttctcgtctccatcttcgtcctcgtcagcctgcacgcctgccctggcttctctgtccggctcctccttcagtttctgtttgggtgttctgtcacagaagacaacacacacacaggctggtcagctcggggggggccctgcaccggggccaacagctcctaagggctgacacaagctcctccccaggttcagaggacaggctgcctctcctgtcttcactgcaggaagcccagagggcatttactactccaggactcaaggtcttcaggaacaccatcaataccccatctgaatgttggtcagagatgccagtggtttaatacaaaaagcagacaaagggatgtcatgatttccgtggcctgatgggaatccagcctgcggtggaggaagacccatgtctggcctgcctaggttgagagctgggctgatgtgcgatcagcgtcagtcagtgaccgtggacagctgactgcacacaggggtccgagtcttcacctcccactctgccagggccctgccgctcaggtggggtattctgcccacctctggattcaggctcagtctcaaaatttgcttcagctaattgttttctttttcttttttcctttttttttttcttgaggcagagtctcgctctatcacctaccctggagtgcagtgatgtgatctcagctcactgcaaccaccgcctcccgggttcaagtgattctcctgcctcagtctcccaagtagctgggaccacaggcatgcaccaccacacccagctaattttttgtatttttattagagacggggtttcaccatgttggccaggctgatcttgaactcctgacctcaagtgatccacccgcctcagcctctcaaagtgctgagattataggcgcgagctactgcacctggcccaacttttttcaacagaggtttgaaaaagtgctacttttcatttctgcccttgtggtctggcacagccacaagcgtgtacccagcctggccaaattgcggaggcagagctgggtcagcccagccatccccactaagccacctcaagatcagccgacagccaccaagctgtagacaagtgagcttgaaaaatgctcactgttctaggcctctggccttggagccatttgtcacacagcattttcacagtgaaaggtaagtgacacagctgctcacctgatggcctttcactaccacatgacacacagctgtgtgaccaaccctgagaagggccctggggttgggaggagaaatcgaagctaacttcaccccgtaatcccagcactttgggaggcgaggcaggtgggtcacggaggtcaggagttcaagaccagcctgaccaatatggtgaaaccctgtctctactaaaaatacgaaaattagttgggcatggtggtacaggcccatactcccagctactcgggaggctgagacaggagaattgcttgagcccgggaggtgggggttgcagtgagccaggattgcaccactgtactccagcctgggtgacacagcaagactccgtctcaaaattaaattaaattaaattaaagttaaaaaagttaacttcagccttcacttcagggtggtctcacctttcacaagcagaacttgcccacataagagacatatgattagtgcccactgttccacaccaacccgttattttaccaagatacttatgttagcaattcagtttcacaacaaagcacaaaggcaggttcgctgcacttacggttctttggtttgacttcggagtctcttttcttcctaagttgcagggaaaaaagacaagttaattttttccatttggtttggatctttctattaaagtgtcctatggaaataaaacacctgaactgattctagagtccactggtgggagtaaagactgtctaccagtgggcacagtagctcatgcctgtaatctcagaactttggaaggctgaggtgagaggatcacttgtgccaggtgttcaagacagcaattttcttttcttcttcagtggggtaagtagacaggaaatgaaactcttagaaaggagatactacaacactgcagtttcagtatttttacttcaaaattcctctactacttgtcatcagttaagtgttgatagcctcacagaaagtaactttattataaatctctacttccgatattaaaggaatgaaataggatggcccaatctgaaaagtagctccaactgagacacaacaacacatcctctgagactgcatttattcatttatttatttatgagacggagtctcactctgttacccaggctggagtgcagtggtgtactcttggctcactgtaacctccaactcccaggttcaaacaattctcctgcttcagcctcccaagtagctgagtttacaggcacacaccaccatgaccagctaatttttgtatttttagtagagacagggtttcatcacgttggccagactggtcttgaattcaagtgatccgtctgccttggtctcccaaagtgctggcattacaggcgtgagccaccatgcccagcctgaggctgcatttaaagaaccagacacatcttgccagagaatcaggcaagtcaaatccaaccctcagaaactccacatgtggtagtctgtgaagagatcgcaaaggtcaggaatattaagaaacactttgcagctgggcacagtggctcactactgtaatcccagcactttgggaggccgagatgggcagatcacgaggtcaggagatcgagaccatcctggctaacacagtgaaaccccgtctctactaaaaatacaaaaaaaaaaaaaaaaaaaaattagccgggcgtgttggcgggcgcctgcagtcccagctactggggaggtggaggcaggagaatggcgtgaacttgggaggcagagcttgcagtgaaccgagatcgtgccactgcactccagcctgggcgacaagagcgagattccgtctcaaaaaataaataagtaaataaataaataaccccgtctctactaaaaatacaaaaaaaaattagcctggcgtggtagcaggtgcctgtagtcccagttactcgggaggctgaggcaggagaatggcgtgaacctgggaagcggagcttgaagtgagcggagatcgcaccactgcactccagcctgggcgacagagtgagactccgtctcaaataaaaataaaaaaaacgcttagcaaatcttcctactacaagaagaaatcctgagagtatgcttacaggtgagggatttcgatcttgccccaggttccttctttggaaggtggtggttgaactagcccgttaggactgcttgttctgaaacaaattcgaggtatgcactgactgcaactgctgtctaatttaactaggatcagggtaggaaaggtgatcaatgaaagaccagcctcggccgggcgtggtgtttcacccctgtaatcctggactttgggaggctgaggtgggtggatcacctgaggtcaggagttccagaccaacctggccaacacggcaaaaccctgtctctactaaaaatacaaaaattaggcggacggggtggcgggcgcctataatcccagctactggagaggctgaggcaggagaatcgctggaacccagggggtggaggttgtagtgagctaaaattgcgccacttcactccagcctgagcgaaagagcaaaattccatctcaattaaaaaaaaagaaaaaaagcaagaaagaccaacctcaagtactgaatggttcaaaaattattgtacagcggccggatgcagtggctcacgcctgtaatcccagcactttgggaggccgaggcgggtggatcacctggggtcaggagttcgagaccagcctagccaacatggtgaacccctgtctctactaaaagtacaaaaagttaattagctgggcgtggtagcggaagcctgtaatcccagctactcgggaggctaaggcaggagaatttgtttgaacgcaggagacagaggttgcagtgagccgagatcacaccactgcactgcagcctgggcaagtagaacaaaactccgtctcaaaaaacaaaaaaaattactgtacattttagttgattccccaatggacagccatcctttactaagctcccaagtaaggcactcgtcacctacctaagttggtaagaaacttctagtcatcttggtttttttttgtttgtttgttttgtttgtttgtttgtttgttttaagaccagtctcactttatcatccaggctggattgcagtgggacaatcatggctcactgtatcctcagcctcctgagctcaagtgatcttcctgcctcagcctcctgagaagctggaactacaggcacactgcctgttgtaagctccaccacatccagctgatttttgtattttttgcagagacggggtctcactacattgcccaggctggccctgaactcctgagctcaagcgatccacccacctcggcctcccaaaatgctagaattacaggcatgagccaccacacccggccctcagtcatcttattaaaaaacaaaacaaacagaaaaaaaaacaggacccagcatctgtattgcatagaaccttagactcagattttacaaagaagatgagggactggggaaagagctggtctgacttcagagaggagaatacaactttatgtctggatgatgctaaagaattttagcacctcctacatctgaaaattagatcttcaccaagatctcgtcagccagagaaggtggctgaggtgacagactgaaactgactagttgatttaagtagcataggttggccggtgtggtggctcgtgcctgtaatcccagcactttgatggctgaggcaggtggaccgttcgaggtcagcagtttgagaccagcctggccaacatggtgaaaccccgtctctactaaaaacacaaaaattggctaggcgcggtggttcacgcctgtaatcccagcactttgggaggccgagatgggaggatcacgaggtcaggagatcaagaccatcctggctaacgtggtgaaaccccttctctactaaaaatacaaaaaattagccgggcatggtggcaggcgcctgtggtcccagctactcgggaggctgaggcaggagaatggtgtgaacccaggaggtggagcttgcagtgagcggagatcaagccactgcacttcagcctgggcgacagagcgagactccgtctcaaataaataaataaataaataaataaataaataaataaataaaaacacaaaaattagccaggtgtggtggcaggcgcctgtagccccagctagttgggaggctgggacatgagaattacttgaacctgggaggcggaggttgcaatgagccaagatcgcacctctgcactccagcctgggtgatagagcgggagactgtctcaaaaaaaaaaaattaaattaaattaaataaataccacaaataagtagcaaagatcctcgctatgacaacctcataacccaccttccatgtagagaactacaaaaaaataagtttgaaaagtattttaggccgggtgtggtggctcacgcctataatcccagcactttgggaggccaaggcaggtggatcacctgagattgggagttcaagaccagcctgatcaacatggagaaaccccatctttactaaaaatacaaaattatctggctgtggtggcaggcacctgtaatcccagctactcaggaggctgaggcacaagaacccgggaggcagaggttgcggtgagacaagatcacaccactgcattccagcctgggcaacagagcaagactccatctcaaaaaaaaaaaaaaaaaaagttttagcacctcgtacgtctgaaaattagatcttcacaaagatctcatcagccagagaagcaagaaggcgaggtgacaaactgaagctctgtgactagttgattaagtggcataggttggccggtgtggtggctcatgcctgtaatcctagcactttggtggctgaggcaggtggatcactcgaggtcaggagttcaagatcagcctggccaacacagtgaaaccccatctccactaaaattagccgagtatggcggcgggcgcctgtagtcccagtgactcaagaggctgggacatgagaatcacttgaacctgggaggcagaggttgcaacgagccgagatcgcacctctgtactcattccagcctgggtgacagagtgggagactgtctcaaaaataaataaataaataaaataaaataaaatatcacaaataagtagcaagggtcctcactatcacaatctcataacccacctttcatgtagagaccacgagaaaacaagtttgaaaggtgtttagccaaagtcaaaggcatttcgatcactagcaaaacccatcttgttcttccacgttccccaccccctgtccccacgtcctggaaggaaattgggaccatataggattaagggagaattaacaaacttagaggtgatagagctttactttttcatctctttcttcttccttttcagtgcgcgttcctgattttgctctttcaggttcttctgcaggaagcggtctagcaactctgtcaagcaaaataacacagaccccaagtgtgagtgccaggagcttccccaaagaagcagttttcataaagctcctctttcccccaaaagcaatcttcattatctcaggagccctgacagacacatactcatttaacatttagtatttgatatgacttttacacctggttcgaatgccagctgccctcgattcattccttccaagaaaacaggagaattctacttgaatctaaacgctaatgatctgaccccaaattcagatacttcataacgatatggttgccatggaaacacacgataaagttcttctttttaaacttttttttttttttttgagatggagtcttgctctgtcactcaggctggagtgcagtggaatgatctcagatcactgcagcctctacctcctgggttcaagcaatccttctgactcagcctcctgagtagctgggattaaaggcacattccaccacgcccagctaagttttgaatttttagtagagacggggtttcgccatgttggtcaggctggtcttgaactcctgacctcaagtgattcgcccatcttggcctcccaaagtgctgagattacaggcatgagtcaccgtgcccggccttaaactttctgaaaaagttttgtgatcaagattacacaactcgtagaacaaaaagaaaggtatagtaactattcttaccgttctctggatgtaactctacgtctcttctcatcctgtgtggagggaaggaagaacaaaaaagattagaatactggtttcaagggaaggtcaacaccaaaagtgtgagttgaaatattaacacatttgacatggttagagcaagagtgggaaaagaaggggcctgggttttggggagaagatctgagaaactcttactctggtattaatccccaccaaccccaaaacaaaagcaggtccgagaagtaggcaggcacactgcccatcactagagatcgcctggtgatactatgtaaaagaatcaaagattctccatcttgtgtcaggaatttgtttaatttatttgttagagaccagtctgggcaacatgggaaacctcatctctacaaaaaatacaaaacttagctcattggcatgcgcctgtagtcccagctgcttgggagggtgaggtgggaggatcgcttaagcccaggaggttgaggctgcagtgagccatgactgcgccactgcaccccagcctggtgacagaatgagacctgtctcaaagaaaagaaaagaaaagaaaaaagacagaactgtaatcccaacactttgggaggctgaagcgggtggatcacttgaggtcaggagttcaagaccagcctggccaacacagtgaaatcccatctctactaaaaatataaaaattagctgggtatgatggcacatgccttgtagtctcagctactcaggaagctgaggatggagagtcacttgaacccaggaggcggaggttgcagtgagctgagatcgtgccactgcactccatcctgagtgaaagagtgagactccatctaaaaaaaattaaaaacaacaacaacaacaacaaaaaaaacaaattggctgggcacggtggctcacacctataatcctggcactttgggaggctgaggcgggcagattgcctaagctcaaggagttcgagaccagcctgggcaacatgggagaccagcctgggcaacatggtgaaaccccatccctactaaaatacaaaaattagccgggcgtggtggcacgcgcctgtagtcccagctactcgggaggctgaagcaggagaatcacttgaacccgggaggctgaggttgcaatgaaccaagattgtgccacaagagcaaaaccctgtctcaaaaaaaaaaaaaagtctcaaaaaaagaagtctaaatacatacatacatacacacacacacacacacacacacacacacacacacacacacacatatatataacatgtatgtatgtaagactgccttgccacttgagctatgacatcatttctcccctggacctccagcctgccctgcagatttcaaatttgctggctttcacaatcttgtgagccaatttctcaaaataaagtctctccccataaatatatattccaactatgtacccataaaaacaagaaaaaaatcaaacgaattatatatatatacatacacgtgcatatgtatatatgtacctatagctgtatacacacatatacattctattggtcctgtctctctggagagccctaaatagagccctagacagggtttttatttacttggacagaacacatatgaagtcacaatcatcaaatacaccaagttaaggtagagtcaggaaatgaaagcactggccctacctggtctttgtcttcttccttgatggactcatccgatttggctctttcagactcttcctgaggtttccgtttggcagggctgtcacacacagtgaggccaaccattagtggaacaagaccctaggcctccagctggcctgaagtggaccctcattcaccaggatgttgaaagaggcttcaagtttaatgtttctctgaatgacgggtttagaatgttgtcttgccatcttgtaagtcctaagaaatcacgggtctaaacaccgatcaacagctgctagtgtcagagaagagacctcacacacctttctgatggagggacacagcaccatccataaagtcagcctcagaccaggtgcagtggctcacgcctataatcccagcactttgggagtccaaggcatgaggatcacctgagttcaggagtttcagaccagcctggccaacgtggtaaaaccctgtctctaccaaaaatacaaacattagccaggggttgtggcgggcacttgtaatcccagctactcaggaggctgaggcaggagaatcgcttgaacctgggaggtggaggttgcagtgagccgaaatcatgccactgcactccagcctgggctacagagcaagactccgtatcaaaaaaaaaaaaaagtcagtctcaaaaaataaaaagctggaatctgatcagtcctgtaatcctatcagtttatagggaacagaaggcaaggggacctgtggaacaccacaaggatgcaatcggcccaatctaggaactattggacaaatgaatttcttcaagtaaatggcaagaagataagagatgaaggaatttaaaatctgtgaggaattttaagtaaaataggagggaaggaatctataactttaaggaacaagtcaaccaaacgctgtctgtttgccacacggcttgttcaccacaaagggaaaaacgtaaataccaactatatatctgatagcagggaattcttacatttttataaagacatcagaacagtattatactttggtttgttaaaaagactgttttggctgggcacggtggctcacgcctgtaaccccagcactttgggaggttgaagtgggcagatcacctgaggtcaggagtttgagaccagtctggccaacatagtgaaaccccacctctactaaaaatacaaaaattagccaggcgtggcggcgcgcgcctgtaatcccagatactcaggaggctgaggcaggagaatcacttgaacccgggaggcagaggttgcagtgagccgagatcgtgccactgcactccagcctgggtgacagccagatgctgtctcaaaaaaaaaagactgctaaatgttagcaattattgtaaaatatgagtaattttttaaaaagttgtcaaaagagatctcattgtctagaaatatactaaactatatatggacaaagtaatccaggtggggcagggacacacaatatgggggtatagatgaaacaacggctgtaacttgataactgttggcactagatgatgggtatttcagggttcattatacaaaactcatgattttgtgtacatttgaactttcctatatgagtaaaaacaggtaacgttttcagaaatgctattcataaatgtctagagaacagaaccgcaagatgaaaacctatacaacacggaagacagaattgccacgtgacgccctaccaattccatcccaaaacagccggcccctaaaaaaggcagccgccaatttatcgtatactgacccctttgcaaaatgagatgtgatggtggtttgcctggtgcttttccttgtaatcctggggctaggtgaaggttcagctgtttaaagaagaaaaagcattaaaaagaaaaaaaaaagccactatcaatagaaagcccacagcaataatgcagttcaacattactaagctattgcaggaagccaggttctaaggactaagcatctttgcatttttattctagtcaacaaccagcttgctaatgttggcagttagcacctgccagtttgttgagccatatcatgtcagttatttgaggggccaaatgctaaagaaggccaggaaacagagcctcttgttaaaatatcaaaagatgaagtgggccaggcacagtggctcacatctataataccaaaactttgagaggctgaggtgggaaaataatccaagctcaggtattcgagaacagcctggacaacatggcaaacccccatctctactaaaaatacaaaaaaattagctgggcgtggtggtacacacctataatcccagctattcaagaggctgaggcacaagaatcacttgaacccaggagatgggggttgccgtgagccaagatcgcgccactgtacacagccttggcgacagagcaagaccctgtctcttaaaaaaaaaaaaaaaagaaaagaaagaaagaaaaaaaagaaataggccaggtgcagtggctcatgcctgtaatcccagcactttgggaggcaagacgggcagatcacaaggtcaagagatcgagaccatcctggccaacatggtgaaaccccgtctctattaaaaatacaaaaattagctgggcgtggtggcacgtgcctgtagtcccagctcctcaggaggctgaggcaaaaaaatcacttgaacccaggaggtggaggttgtggtgagccgagattgtgccactgcactccagcctggcaacagagtaagactccatctcaaaaaaaaataaaataaagggccaggtgaggtggcttacacctgtaatctcagcactttgggaggccaaggcaggtggatcacctgaggtcaggagttcgagaccaccttggccaacatggtgaaaccctgtctctactaaaaatacaaaaattaactgggcgtggtggcgcatgcctccatctcaaaaaataaaataaaaattaaaagaaaataaaataaggctgggcatggtggctcacgcctgtaatcccaacactttgggaggccgaggcaggtggatcacgaggtcgggatattgagaccatcctggctaacacagtgaaaccccatcctactaaaaatacaaaaaattatccaggcgtggtgtgcgcctgtagtcccagctacttgggaggctgaggcaggagaatggcatgaacctgggaggtggagcttgcagtgagccgagatcgtgccactgggcaacagagcgagattctctctcaaaaataataataaaataaaacaaaataaaaatgaagtagctgagaaccagacctgagctcaagtactatcctattgtttgttttttaaaaaattccagaagaggctgggcgcggtggctcacgcctgtaatcccagcactttgggaggccgaggcgggcggatcatgaggtcaggagatcgaaatcatcctggctaatatggtgaaatcccgtctctactaaaaaatacaaaaaaaattagccgggcatggtggcgggcgcctgtagtcccagctactcgggaggctgaggcaaaagaatggcatgaacctgggaggcagagcttgcagtgagccgagattgcgccactgcacttcagcctgggagacaacaagactccatctcaaaaaaaaaaaaaaaaaaaaaaaatttccattagagttcctttgcctaaaactgggcaagagtctgagaataaatgtttaaccaggcatataaggtcttagaaggagtaagtatttgtagcacttgtcatctgcaacctgtcacactcatagccatgttttgggatctaatgctgcaacttggtcgaaaacaacatttttttttttttgagacagtgtcttactcttgttgcccaggctggaattacagacacccgccaccacgtctggcaaattttttgtattttcagtagagacagggttttgccatgttgggcagggtggtctcgaactcctgacctcaggtgatccagccaccttggccacccaaagtgcagggattacaggcatgagccaccacacccccagctaagacaaaatttaaagacgtacacatctaagctagttaggaagtgtccagtaattactagtgaggatgcgtacaaaagaaaggaacctggacacactgacctggggtccaagtttaactgcccccttatatgctaccaaagcctgcttctaggttgaaaatgagccaagtggggccgggcacggtggctcacacctgtaatcccagcactttgggaagctaaggcgggaggaccacttgaggtcaggagttccagaccagtctggccaacatggtgaaaccccatctctactaaaaatacaaagattagctgggcatggtggtgcccgcctgtaatactagctacttgggaggctgaggcaggagaatcgcttgaaactgggaggcggaggttgcagtgagccgagatcgcgccattgcactctatcctgggcgatagagcaagactctgtcattaaaaaaaaaaaaaaaagaaagaaagaaagagagttaagcagggccaggcgtggtggcttatgcctgtaatcccagcactttgggaggccaaggcaggtggattacttgaggtcaggagttctggaccagcctggccaacatggtaagaccccatctctactaaatacaaaaattagctgggtgtggtggcacatacctctaatcccagttacttgggaggctgaggcaggagggtctcttgaacctgggaggcagaggttacagtgagccgaggttacaccactgtgctccagactgggcaacacagtgagactccatctcaaaaacaattaaaaataaaaggaatcatctgctcttacgcttagcctctccatcggacttgctcctcctgggcgtgcgaggtttggaaaggggtttgggggggctgttggcatctgccattcccactctacgggcttcacttcttgcttggttcccgttttctagacgtccattcacttcccggttgtaagcatgagcaccgttctccaaggacaaatctttatttaaaagggatttgactttagccaggtagccctcctacagcaggaaaggataatttaagtagcagtgaatgtaaacaagtgtcagagaacaaggaaacacatgtgtttccttcatcatcatcatcatcatcatcatcatcaggcaatgaggacagctggggatcttgctgcctccctggtcacagacaagttactaggaggagacatttttctagaggctaggatgctgagaactgacttacctcggataattcttctttacgtaatttggtttccaagtcacataactgattctttatttctgtttgcagaaattcgtgcaagagattcaatttctccttcacacattcctaagggaaggatataggtttagcagtacccacattcccaagctattcactagtggactaatacacaaattattgagctgcctgatcacatcacaatgagtgaatggcaggcaatgctgtctcagtcaaaacactaaacagtcatgaaatgtgttcagggaatttccattaggatcacttcactcctgtctccaaagtggtgaaaaatgggaaagctggaggtgagatggagacatatcatggtttataagaataatactgtgcttctgtaaagtgtcggccaggcacagtggctcacacctataatcccagcactttgggaggccgaggcaagtggattgctttgagccccagagttcaagaccagcctggggcaacatgacaaaatcccatctttacaaaaaatatttaaaaattagctgggcatggtggcttgagcctgtagttagagctactcaggaggctgagtgggaaaatcacttgagcctgggaggcgaaggttgcagtgagccaaaattgtgccactgcactccagcctgggctacagaatgagaccctatctcaaaacaataacaaaaacacaataaaacagtgttaccaggacaagttacaatccagagtagattgtttaggaactgagattggttaaaaaaaaaaaaaacctgggccaggcatggtggctcacgcctgtaattccagcactttgggaggccaaggtgggcagatcacgagcaggcgttcaagaccagtctggccaacatggtgaaaccccatctctactaataatataaaaattagctgggcatggtggtgcgtgcctgtagtcccagctacttgggaggctgaggcaggagaacagcttgaatccgggaggcagaggtcacagtgagccgagatcatgccattgcactctagcctgggtgacagagtgagactctgtctcaaaaaacaaaaacaacaacaaaaaaaaacaccaccaccacccaactattagcagcaaattagtgctgacatttaacaagaatatccaaattatctttgaaactccatgggaaaaaatgcaaaatccatttaaagaaaacaaatttctttttatgagccacaaagtgtgtcagtcagatttggtaataagaaaaattttaaggtggagattaccttttctgttaagctgtctctttccaaatctttgagcctgggaggaagaaataggggagaaaatacaaacacttgttaagcaacttcatttgcctgtaagaatatcacagttctaaagaagttttggacacaaacaagtttaacatatgagtgttagaaaaaactaagctggcttttgtctccccgcaagagtctagagtgtcctactggaatgcctaatgctaagaagtcatctgatctgaacaaggttccccttttgggggtcatttttctgatgattgtgagattacatagcagctctgtaacacaattatgtgtatgtgtgtgtgtgtgtatatatatacatatatatgtgtatatatatacatatatatgtgtatatatatgtgtgtatatatatacatatatatgtgtatatatatgtgtgtatatatatacatatatatgtgtatatatatgtgtgtatatatatacatatatatgtgtatatgtgtatatatacatatgtgtatatatatatacacacacacacagcagctctgtaacagagtatgtgtgtatatatgtatgtatatatgtgtatatatatacacacacatatatacatacatacatatacattatacagatagatagacagacagacagacatggagtctcgctctgttgcccaggctggagtgcagtggtgcgatctcagctcactgcaaccctcaccttctgggttcaagtgattctctcacctcagcctcccaagtagctgggattataggtgccaccagcctcgttaattttttgtattttgagtagagacagggtttcaccatgttggttaagctggtcttagattcctgacctcaagtgatccgcctgcctcagtctcctgaagtgctaggattacaggcatgagtcaccatgtctggcatgcatatatatatacacgtatatatatacacgtatatgtgtgtatatatacatatatatgtgtatatatacgtatatatgtgtatacatacgtatatatgtatacatatgtgtgtgtatatatatatacacgtatatatacgtgtgtatatatatatatattttttttttttgagatagggttttgctcttgttgcccaggctggagtgcaatggtgtgatctcagctcaacctccgactcccaggttcaagcgattctcctggctcagcctcccgagtagctgggattacaggcatgcaccaccacacccagctaattttatatttttagcagagacagggtttctccgtgttggtcaggctggtttcgaactcccgacctcaggcgatccacctgcctcagcctcccaaagtgctgggattacaggcatgagccatcatgcccagcctgtatattttaaaaggtaccagagaccaggcatggtggctcacgcttataatcccagcactttgggaggccaaggcgagcggatcacttgagcccaggcgttcagaccagcctgggaaacatggcgaaactccatctctacaaaaatacaaaaattagtggctgggcgtggtggctgatgcctggaatcccaacatacagcagcagttgggtggattacctgagggccaaggtgggtggattacctgaggtcaagggtttgagaccagcctggccaacatggcgaaaccccatctctactaaaaatacaaaaattagccaggcgtggtggtgggtggctgtaatcccagcaacttgggaggctgaggcaggagaatcacttgaacccgggaggcagaggttgcagtgagctggtcacaccattgcactctagcctgggcaacaagagtgaaactctgtctcaaaataaaataaaataaaataaaataaaaataactgggtttggtggcatgtgcttgtggtcccagttacttgggaggctgaggaaggaagatcacctgagcctgggaggtcgaggccacagtgagccgtgattgcatcactgcactccaatctaggagacagagtgagaccctgactcaaaaagataccaggaaagagggggcaggtcatatagttggggcactcccgtaagggaaatgacctacagctggtctttctccagttgggtctgacaacagcccataacaaggtgtgccacagtatggccagtgtcagaatgagtagcccagggccacaggacactgtggggaacagccagctgatgttcctaaaggcctggtggggggtggtggcattttgaggatgaaatgggggagtcaagcatccagggaagcaaggggtacccacacagagggcagatagaggtgaagttagaggaggtggctggcgcctccccgaataactcattcttcaggatgtctctagctagtcattcctaaatgtagaactgccaggagtttgcctgggaaatcgtggtctgatttgattactgacaattagtagcttgactctttcagggacaaagagggaaaaaaataaaagaacaatagccggtgcagtgccgcggtgctgcgtgcctgtaaccccagctactcaggaggctgtggtgggaggatggcttgtgggcaggagttcgagtccagcctggacaacatagggcgatcctatctcttcagaaaaaaataaaggaacaagaagagaaggtaccaaggaaagggagaggaacacaggctgttgttcccagcctgggtgctaactacagactgcggggtgagaacaggcctaaccagctgggtaagtgtctgttggtggagagaaggtgccccaggcagggaccaggccactgccatctctggacctttccacctagcacccgcacagacaggtgctcagttatcatttgcctgaagggcagaagtggctcctccaggctggccttcctagagggtaagtgcaggcagcagcatgaggaatgctttgctggacccatgtcttacaacagctgctctgggtcatgcgggccctgattccccaccagcgccgctcacatatgagcacctgctgaatgccaggccctgctccaggcaaagagctaagtgattagatgtaggtgtcactaggcagggacttcctgacttgctgtgtggttaggaaagaccattctgtagggccgggcacggtggctcacgcctgtaatcccagcactttggaaggctgaggtgggcggatcatgaggtcaggagatggagaccatcctggctaacacagtgaaaccccgcctctactaaaaatacaaaaaattagccaggcgtggtggtgggcgcctgtagtcccagctactcaggaggctgaggcagaagaatggcgtgaacccgggaggtgaagcttgcagtgagccaagatcatgccactgcactccagcctgggcaacagagcaaaactctgtctcaaaaaaaaaaaaaaaagactgctctgtagaagagacacttagcaccctacaaacacagtggtaatatagactgtatattatatatactgtatcacttggactcaaggtgctacaaggccaggcaagacgcagtggctcatgcctgtaatcccagcaccttgggaggccaaggcaggaggatcacttgaggtcaggagtttgagaccagcctgggctacactgagagatcccatctctacaaaaaaaatgtaaaaattagctgggtgtggttagtgtgcacctgtggtaccagctacttgggaggctgaggtgggaggatcgcttgagcctgggaggttgaggctgcagtgagttatgatggtaccactgcaatccagcctgttcagcctgggcaacagaacaagaccctgtctcaaaagaaaaaaaaaaaaaaaaaaagatgctttgacatcaggatttccaggagcacaaggaacctcttccaggcaaaagtcattctacccttgtagcaactggggtccaaggagagccttaagtcaggagggctacagaaactggtacttccagccagaggcacacacgctgtggtaatagcgttacacttgacttctcagtcacgccgctgagaaaactggaaggacatggcttctacctcgaccaagccagccagtcccctgatcccgaggttgcctggggtgtgaaggacaaggttcaactgattgcggagaccaaggtgtccttgcagaatgggtctgctttctttcaacccctcatatgaactgggatatttagcctggcaaagagaatagagaaaccttcaaaacccctagaatgtttcatccagtagaaactggatttaacctgcctggccccagagtggcaggtgggatcccaggcaggcagtgaggagctggcgggagggtaactttagcgacatcccttccctggtaaaactgtgatgacaccgatcacacctgctgaagccaggagggtcgcagacagccgtgaaggacggagcagaggactcagaatgccggcttagtgcccagcctgagaccctatgattccttcctagtgcttccctcagagatgaaccctctgcagaggggagataagatatatataaacagctggccaggcacggtggctcatgcctgtaatcccagcactttgggaggccgaggcgggcggatcacctgaggtcaggagttcgagaccagcctgaccaacatgaagaaacttcgtctttactaaaaatccagaatcagccaggcatggtggcacatgcctataatcccagctactcaggaggctgaggcaggagaatcgcttgaacccgggaggtggaggctgcggtgagccaaggtcacgtcattgcactccagcctggacaacaagagtgaaactccgtctcaaaaaaaaaaaaaaaaaaaaagatatatataaacaaccacagaggaataaggcaaatacagctcacgcctgcgggattcccaagagaaagggtataacagcctcaggaagaagttgacagctctgtgtgaaccgggcacaggaagctgctcaaacaggggcaccattgagaagtggctggttctggaaacacacaagaaacaaacgtgagactggccacatacagggagggaaaggcacctccagagaggtggctggggacagtcggagggagggcaaaagcatcacacttatccatcttgttccatagttaacaaacaccaaagcagtcaaggggaagtagaaccaatgacatcagagccgtgttaagaaaactaacccagcagaggtatctagtatagattggataggaagaaattataaaatgttagattactctaacacctctacgccagaaatgctcgtctgaaatacagcagaccatggctgggcgcagtggctcatgcctgtaatctctacactcgggaagccaggacaggaagatcacttgagcccaggaattcgagactagcctgggcaacagagcgagaccctgtctctacaagaaagaataattagctggctgtggtagcatgcacctatagtcttagctactcgggaggcagaggcgggaggatcactagagctcaggaatttgtgaccagcctgggcaatacagtgagaccctgtctctacgagaaaacagtaattagctgggtatgacagcacgcacctgtactcctagctgctcaggaggccgaggcggaaggatcactagagcccaggaatttgagaccagcctgggcaacacagcgagaacctgtctctacaaaaaatagtaattagctgggtgtggtggcatgcacctatagtcttagctactcaggaggctgaggcgggaggatcactagagcccaggaattcaagaccagcctgagcaacacagcgagaccctgtctctacaaaaaatagtaattagtaattagctgggtgtgctagcatgtgcctataggcctagctactcgggaagccaaagcgggaggatcaatagagctcaggaattcaagaccagcctgggcaacacagcagagaccctgcctaaacaaaaaatagtaattagcttggtgtggcagcatgcacctgtggtcctagctactcaggagactgaggcaggaggatcactagagcccagtgagctataattgtgccgctgcattccagcctgggtgacacagcaagaccttgtctctaaaaataaaatatagtggaccatgcaagacaagttacaagtctctgtcaaaccagcttcttcaggccggctgcatggcagctggagcagggctgcccaagaaggcatccgcagtaggcaaaagagtagacccactgggcacagtggctcatgcctgtaatcccagcactttgggaggctgaagcgggtagatcacctgagctcaggagttcaagaccagcctgggaaacatggcaaaaccccatctctactaaaaatacaaaaattaaccgggcttggtggctcacgcctgtaatcccagctactcaagaggctgaggcacaagaatcatttgaacccaggaagcagaagttgcagtgagccgagatcatgccactgcactccagcctgggtgacagagcgagactccatctcaaaaagagtggacccaccgaaaaatgttcatgccctaatccctggaacctgtgaatatattactttacgtggccaaagcgattttgcagatgtaactaagaatacagaccttgagatggggagattatcctggattatctggggtgggcccaatctaatcacttcagcccttaagaacacagaacctttctagctgcagagagcgggcaacgttggaggacgggtcagagagagatgcaacccgcaaatgctgactttaaaggtagaggaagggggcatgagccgagggatgagaccgcctccagaagcgggcaacgaccctcagtttagaaccagtgaagaaaatgggacctgagtcttacaactaccaccttctgccaacaccccaaaataggaaacagattctcccctggagcccccagaaaggaatgcagcctgcttacaccttgattttcatccggtgaaacccacatcagatttctgacctgcataaggtaataaatgtatgtcctttaagccggcaagtttgaggcaagaccctccacctgcaaaaagattatgaatcgctgaagactcagatgattttttttttttttttgagacggagtctcgctctgttgcccaggctggagttcagtggcatgatctcggctcactgcaacctccgcctcccaagttcaagcaattttcctgcctcagcctcccatggagctgggactataggcgtgtgccaccatgcctggctaattttttttgtatttttagtagagacggggtttcaccgtgttagccaggatggtctcgatctcctgacctcgtgatctgcccaccttggcctcccaaagtgctgggattacaggcgtgagccaccacgcccagctgatttttttttttttttgagacagagtctcactccttcacccaggctggagtgcagtggcacaatcatggcaaactgcagcctcgacctcatgggttcaagtgatcctcccacctctgcctcccgagtagctgggaccccaggtgcatgccaccacttttggctttatttttttttttgagatggggggggtcttcctatgttgcccagactagtcttgaactccttggctcaagcgatcctcctgccttggcctcccaaactgctgggattacaggcatgagccactgcacacggcctagtctaataacttttacacatactaggaaaccaaaatgtgtgtgtgactcactttcttgctagattcactttactgcagtggtctggaaccaaacccacagcatccccactgtacacacagtaccacgtaataaccagtgatgaagggctttggacaggtgctgctctcaacatatctgtactgataagctcagtcttcctaacacccctgtcgagcaggcagccccaccccctttttatagatgaaacaccaaggcaccaagaagttcaataacttagccatacggctggcaagtagggcggcatttgaaacccagcagtctgtacccctagaattctaccacaggggagcaaaacaaaagaggtaagtcaattttgccttattcagtatgtactcagtagtagccaaggaactggagttaaggagttcaagacctagcttaatcccatcacagaatgactagcagtaagaaagctgtggtagttacgaaagctaatcagttgtgcaaaggagtctgctagcatcagtgttaatccaggctgtacaggggaagagctggcatgcaagcatttgagtctactgtgctccaagctgcagatacagtgaatacggcagacacgctctggtaacagaccctgaaataatcactaatttcagtgttataatggcaccatgcgggatacaccgacaaaattcaacactctttattgtggagaagcaagcctagctgtctgagagcaggcttaagaatgaattaaaaggccaggcacggtggctcatgcctgtaatcccaacactttgcggggctgaggcaggcgaatcacttgagtccaggagttcaacaccagcctggccaacacggtaaaccccggtttctactaaaaataagaaaaagttagccgggcgtggtggcacatgcctgtaatcccagctactcaggaggctaaggcaggagaatcacttgaacccgggagggggaggttgcagtgagccaagttcgcaccactgcactccagcctgggcgacagcacaagactctgtctcaaaaataaaataaaataaaataaaataaaataaaataaaataaaataaaataaaataaaaacaatgaaccggctggacaccatcatacctgtaatcccagcattttgggaggctaagataagtggatcacttgagatcaagagtttgaaaccagcctggtcaacatggcaaaacccagtctctaataaaaatacaaaaattacctgggcttggtggcgggcgcctgtaatcccagctacttgggacactgaagtaggagaattgcttgaactcgggaggtggaggttgcagtgagccgagatcacggccactgcactccagcctgggcgacagagcaaggctcagcctcgagggggaaaaagaaaaattagctgggcgtggtggtgcacacctgtaatcccagctacttgggaagctgagacaggagaattgcttaaacccgggaagcggaggctgcagtgagctgagatcacaccattgcactctagcctgggccacagagcaagaccctgcctcaattaaaaaaaaaaaaaaatctaagtttcaagtactgttggataccatgtttatttttcatttaatgaaatattttcaaaatgtaaaaaaaaaaaaaaaagtctgtggagtgagtcatataaactacaatttcaatgtctaccacatggtcaaaagcagtcctccaaaactccaatgcctacagtgaagcaatctgagtgtaaagaaatgtggaacccagggtcagtggtggattgtaaggctcacctaatggtattccaattcagccaaacaaaatatttgcacagggccaacagagcccctgagccagtggcctactggcaacccctgttgaagggaaaggctttggcaagcagcagaccttagcaggaattcctgcttcctggcagttaactcctgcagcatccacttttaagaactcttgaggaataatggccgggccctgtggctcacgcctgtaatctcagccctttgggaggccaacgcagaggattgcttcagtccaggagttcaagaccagcctgggcaacaaagcaagaccctcatctctaaaaaaaaaaattttttttttttctgagacagagtttcgctcctgttgcccaggctggagtgcaacggtgcaatctcggctcctgggttcaagcgattatcctgcctcagcctcccgagtagctgcgattacaggcacctgccaccatacctggctaatttttttgtatttttagtagagatggggtttcgccacgttggccaggctggtctcaaactcctgacctcaggtgatctgcccatctcagcctcccaaagtgctgggattacagacgtgagccaccgcgcccagccttctaaaaaattttttaaggattaacttgggcatggtggcatgtgccagccactcaggaggctaaggcaggaggattgcttgagctcaggggttcaaggctgcagtaagccatgactgtgccactgcattccagcctgggtgacacagtgagatcctgtctcttaaaaaaaaactgaaaaaaacaagctaagttagccactagcatgtgaacctttatgtgccatgcatattctcatttaacccaataccagctgaaaacccatgtcattattcctagactatggatatagaggtggcatacgcttgtttaaggtcattgagccagtggaggtcatgttttcaagaaggctgggcaggctgggcatggtggctcacacccgtaatcccaacactttgggaagctgaggcaggaggatcgcttgaggccaggaatcgaagaccagcctgagcaacatggcaagaccccatctctacaaaataaaaaaaaggaataaaaaaggaaggccgggcccaaacttctctgaattgggtgtaacatcatgaagccaggcactttcataatttcacttccattccattttaaatcaagttttattttgggagaatactggcacagatgattcaagaagatatatacccactaactggttaagaagtggtttgactataatcccagcactttgggaggctgaggcaggtggatcacgaggtcaggagttcgagaccagcctgaccaacatggagaaaccccgactccactgaaaacacaaaaattagccaggcgtggtggtgtgcacctgtaatcccagctacttcggaggctgaggcaggagaatcacttgaaccctgaaagtggaggttgcagtgagccgagatcacgccaccgcattccagcctgggtgaaagaatgagactccatctcaaacaaacaaacaaaaaaaagtagtagttaaggcatgatggctcatacttgtaatcctaacctttgggacacaaaggcaggaggactgcttgagggcaggggtttaagaccagcctgggcaatatggtgaaacctcacgtatacagaaacaaaaactaagaaagtcatctgggcatggtggtgggcgcctgtggtcccagctactcaggaggctgaggatcccttaagcccaggagttcaaggctacagtgagttataattgtgccagggcactccagcctggacaacagagtgagacccatctctaaaaataaaaagtgtttctttttttgagacagggtctcactctgtcacccaggctggagtgcaatagcgcgatctcagctcgctacacacagcctcaacctctggggctcaagtgatactcccaccttagtctgttgagtagttgggaccacaggcgcacggcactactccaggctaatttttgtatttttagtagacatggggttttgccttgttgcccaggctggtctcaaactcctggctcaagagattcgtccgccactgcctcccaaattgctgggattacaggcataagccacagcacccagccttcaaaaaaaaaaaaaaaaagaaaagaaaaaaagcgggggttgaaccaaatatccatccctccccaaagacccaaatcagaaccggactggcccaaccaggtcagttaacaagcctaaggaaatagaaaaatggcaaagagtgctttcacaaatccagctggaagtgtccacgcctggtgagggttcctctgactcacgcacacctcacttgaacaagttttcaggaatgaactgatggcgttcatgaacaaggggctgggaccagtgctcccactgatccttgtgcacggaagttggacagaggcatgaactgctaaagccagggcctccaacattagacacacactaaagaacacacccatgaacacacacaaacacacacgaaagtgtagccagttctcattagcaagacttccctgatgcccacggctcacaggcacagatttacaggaaaagaccaaccatgcagccttcacgcttcccgggccctgcgctgcaatgcacggttaaagttcctgccaaaacatggactttcccaaggagcaagaaccacacagtcccaactgacagaatgagtaccccacggaaggctgggctctcgaacatgagccagcccagcccaggccccgacgggtgacatccgtctctggaggccgccatcgagatgcacagctttgggggaaaggcactgagggaccccccaccacagaagcgcccccggggaccgggccggacaccggaagtggaggccgaagtgccggtgcccgaggggtgtccgttggccgcgggctgcccacttcctgtgcgaccaagctggagtcaagagcccggcccaccgctgcttgaagaaggggaccccggaaacgaacccaaagcttgctgtatttggggatcaaaagagaacccccaccccgcctagtttctagccaccagggagctacgggggaatccacggtccattttggcgccaaacagcccgggcacgcgcgaccggaagtgccaccctgcccgcgccaactgccgctgcgcgccgcaccaccccacgcatgcgcgcccgtctgtcagcagcggccaccggccaccccgaggggaagcgaccccccacccagcgccctgcctgtccccctgagtccgtgttcccccccatggtacctaccgcctgcggacatcgtcgggcagcgagatggccgggacggccagtgtgggcacccgggctggggcggtacgcgccggcatctcggaggcttcagcagacgcggcggcggcagcgcaggcgccccggcttttcgcgcggaaaccgatggggaggggcgatgagcggaggcggcgtctaccaccccagtccgggcgtgggggaggaggggatgtaccaaacggagagaggcgataccctgtgcagaaggatggaacggagccggccatgcccagggaacacgcatgcgcaaggcgggcacacaccccccccacgcggagcagtgggctcgtccaagctccacggtttgctgggaggtgggcacggtgcccgaggcattcattcattcattctttcaggtgtgatggggataaagcagcgagaagcccccaagggtttgtgagagcccttgagtaaagtcctcagttccaatccaacctccatctatttgctggctatacgaccttaggtgggtcactacggctcagcctctgtgtcctcatctgtaaaacggggtaattgcacctactctagaaaatcttgagtatacacagaatttgtagctagtaccaagaatctcacagtgtatagaggcccatgccacttctatacccagtgtgtggggggttttttgttgccttttttaagcaccacgtggctcacgcctgtcatcccagcactttgggaggccagggtgggaggatcgcttgagcccaggagttttagaccagcctaggtaacatagagaaactgcatctcaaaaaaaaaaaaaaagaaagaaagaaagaaagaaaaaaagaaaaacaaaaattagctagtcgttgtggcatgtgcccatagtccaaactactccagaggttgaggcaggaagatcacttgaaccggagaggcagaggttgcagtgagccatgattgtaccactacattccagcctgggagacagagcaagaccttgtctcaaaaaaataaaaataaaaagtaagaataaattaagaagcaccatgtcaggcgcagtggctcacgcctgtaatcccagtgctttgagaggcccaggtgggaggatcgcttgaggttaggagttcaagaccagcctgagcaacatagggataccccatctctacaaaaaatacaaagatttgctgggcatggtgacacacacctgtaatcctagctacttgggaggctgaggtgggaggatggcttgaaccctggcagtgtaggctgcaatgagccatgattgggccactggactcctgcctgggcgacagggtaagaccctgcctcactctgtcaccccggctggcgtgcagtggtgagatcttggctcactgcaacctctgcctcccaggttcaagcgattctcatgcctcagcctccctagtaggctgggattacaggcgtactccaccacgcctggctaatttttgtatcttcggtggtagagacagggtttcaccatgttggccaggctagtctgggactcctagcctcaagcagtccacttgcctcagcctcccaaagtgctgggattataggcctaagccaccgtaaccagccagaattttttttttttttaaagcaccagaacatgggggaaagattgtgtctttaacaaatggtgctgagaaaactgtataaccacatacaaaagaatgaagttggacccttaccttacaccatatacaaaaacacaaaacttattaaagattaaacataagacctgaaactatagtgctcctagaagaaaacatggggaaaagcttcatgacaatggatttggcaatgatttcttggatatgacagcaaaacacaggcaacaagacaaaagatagacaaatgggtttgcaacaaacttaaggatagctatacagcaaaagaaatgaccaacagtgaaaaggcaacctacagaatggggaaaaaaaaagtttgcaaactgtattatctggtaaagggttaatatccggaatatatgaaaaattacagccaggcatggtggttcatgcttgtgatccctgcactttgggaggcccgggtaggcagatcacttgagcccggtagttttagaccagcctgagcaacatggcaaaacctcgtctctaccaaaaaaagaagaaaaaaattatataaaaaataaattactacccgtcaggcttggtggctcacgcctgtaatcccagcactttgagaggccaaggcgggtggatcacctgaggtcaagagtttgagaccagcctggccaacatggtgaaaccctgtctctcctcaaaatataaaaatttgctgggcatggtggtgtgcctgtaatcccagctactcggaaggctgaggcaggagaatcacttgaacctgggatgcggaggttgcagtgagccgagattgcaccattgcgctccagcctgcgcaacaagagagaaactctgtctcaaataaaaatttaaaaaataataaatttctacaatgcaacaacaaaaactcgatttacaaatgagcaaatgggctgggtgcggtggctcacacctgtgatcccagcactttgggaggcccaggcggcaggcggatcacgcggtcaggagatcgagaccatcctggctaacgtggtgaaaccccatctctactaaaaatacaaaaaattagccaggcgtggtggcagtcgcctgtagtctcagctaatcaggaggctgaggcaggagaatggtgtgaacccaggaggtggagcttgcagcaagccgagattgcaccactgcactccatccagcctgggcaacagagcgagactccgtctcaaaaacaaacaaaaagagcaaatgatttgaatacatactttcccaaaggagatatgcaaatagaaaacaggcatatgaaaagatgctcaacatcactggtcatcagggaaatgcaaatcaaaaccacaatgaaatatccctaagaccccttagaatggccactgtcaaataataagtgttggtgaagatgtggagaaactggaacccttgtgcacggttgagagtcgaataaaatggtggagctgctatgagaaacagcatggaagttcctcaaaaaaattaaaaatagaattatcatatgatccagcaatcccatttctggatataaattcaaaagaattgaaaagaggatcttaaagagatatttgcatacccgtcttcattgcagcattagtcacaacagccaagagacaggaaaaaaaaaaaaaaagatcatattgctgctaagagatggggtcttgctgtgttgcccaggcaggtgtcaaactcctgggctcaaggcatactcctacctcagcttcttaagtagctgggactacaggtatgtgccaccacaatgggctaactttttatattttttgtagagacaggatttctccatgttgcccaggctggtctcaaactcctgagctcaagcgatctgctggccttggcctcccaaagcgctgggattacaggtgtaagccactgcacccagcctaattcagtctttaaaaaagaaaaaatggccaggtgcagtggctcacacctgtaatcccaacactttgggaagccaaggcgggtggatcacctgaggtcaggagttcgagaccagcctggccaacatggagaaaccccatctctactaaaaatacaaaattagctggacatagtggctcatgcctataaccccagctactccggaggctgaggcaggagaattgcttgaaccctggaggtggaggttgaggtaagctgagattacaccattgtactccagcctgggcaacaagagggaaactccatctcaaaataaataaataaataaataaataaataatataaaagtaaaaatacaaaattagctgggtatggtggcatgcacctgtaatcccagctacttaggaggttaaggcaagagtactgcttgaacccgagaggtggaggttgcagtgagctgagatcacaccattgcactccagcctgggtgacaagagtgaaactccgtctccaaaaaacaaaagaaaagaaaaaatatcttattatatgctacaacatggatgaaccttgaggacattacgcacagtgagagaacctaatcacacaaagacaaataccatacaattccacttatgaagtatctaaagtaatcaaaatcttagaaacagaaagtagaatagtggttaccaaggccgggggggaaggaggaaaaggagttattgttcaagagtttcagttttacaaaatgattccagagatctgttgcacaacaatgtgtatatactgaactgtacactgaaaaattgataagatggtaaataaaatactattagtaaatggggctaagtttttttctttttttttttcttttttttttttttttgacagagtctcactctgttgcccaagctggagtgcagtggcacgatctcggttcactgtaacctctgcctcctgggttccagcaattctcctccctcagcctcccgagtagctgggattacaggcacgcgccactacgcccagctaatttttgtatttttagcagagacagtgttttgccatgttggccaggcttgtcttgaactcctgacctcaagtgatccgcccacctcggcctcccaaagggctgggattacaggcatgagccacggcacctagccctaaaaagtactttaccttcaaccacaagaagcaccagaaaggagtttaaaattagggcatacttttacatttttgtattgcaaaatatttgtattataaaattcacaagtgaatgtgtttatatgcatgtacatatacatgcacacacagttcccccaacagctggtagggaagggtcatcctggccagaagtgaaccttcacacagaccctccatttgctatgaattgctcacacttggcaggacccaggaagactgaataataagactaaaattcccagcgattaatattgaatcagcacttacgtagtctaccaggctctttagataactttttctttttcaattttttttttttaatagagacagggtcttactatgttgcccaggctggtcttgaactcttgagctcaagcaattacaggcatgagccactgtgcctggggctttttgtttttgttgtttgttttttgtttttgagactgagtctcgctctgtagcccaggttggagtgcagtggtgcgatctcggctgactgcaagctccgcctcccgggttcacgcaattctcctgcctcagtctcctgagtagctgggattacaggtgcccgccaccaagcccagctaattttttgtttatttttagtagagacgaggtttcactatgttggccagactggcgtctaactcctgacctcgtgatctgcctgcctcggcctcccaaattgctgggattacaggcgtgagccaccgcgcctggctgttttgttttgttttgttttttgagacagggtttcactcccgtctctcaggctggaatggaatggtgtgcaatctcggctcactgcaacctccaccttccaggctcaagcaattatcttgcctcggcctcccgagtggctaggaatacaggcatgcgccagcacgcctggttaatttttgtagagacaaggttttgccgtgttgcccaggctggtctcaaactcctgaactcaagtgatcctcctgcctcagcctcccaaagtgctataattacaggcttgagctactgtgcccagccttcttctattttgagacagggtctcactctgtcacccaggctggaatgcagtggcacgatcaccattcactgtaacctcagcctcccaagctcaagcaatcctcccatctcagcctcccaagtagctgggacccacaggcacacaccaccaggcttgactaattttttatatatttttgtagagacagggtgtcccatgttgcccagcctgggaattatttaatttaatccttaaccataaaaggtaggtagcaggaccctgtttgccatggcctgaaatattcatcacataggactctcagaggccacttacccaagatcatagactcactcagcagtacggaccatgaatccagctgtctttcatccagaacctgagggcaaaacagtggccccagggatggccagttgtccaggccatgggagaccaaagggatagcacttgaaggaagctggactagggtaggaacagaaagggaatgacagaagacagtctcaccagagtgaaccttaggcccataaacctgtcagaacccatgatcagggcccctaacccaccttagagccaggggaggaaataagaagaggggacagatgaacagacctcctactcagggacttcaacgcaaggagaccagctgcatttattggagacttcctctaagctagatttcctttgtaacagcattgtcaaccttgtcaggaagagatagcttgacccatcttccagatatggggaaaaaactcagatatggaaacgatttgccttaagggtaccctgcaagttggaatttgcttccaagttgtctgggcaaaaaatccaggcatctcctttcatgcctctccttgcctcacatgcaaaacatgagcaagctctgctggttcttcctctaaaatataagccaagtctttctacttatccacgctcctgctaccccagcccaaactgccatcatcactcacctggacttcattctagaagcctcctccctgacctcccagctgccctggagagtcccttccaaacgcttcggctagaaagctttattttatttatttatttatttatttatttatttagagacagagtcttactctgtcacccaggctggagtgcagtggcacaatctcagcccactgcaacctctgcctcccggattcaagcagttcacctgcctcagcctcccaagtagctggaattacaggcacttgccaccatgcccggctaatttttgtatttttagtaaatacaaggcttcaccatgttagccaggccaactcctgacctgtgatacacccacctcggcctctcaaagtgctgggatcacaggtgtaagccaccgcaccaggcctttttttttttttttttttttttttttgagatagagtctcactctgatgcccaggctggagtgcaatggtgtgatcttggctcactgctacctccatctcccaggttcaagcaattctcttgccttagccttccaagtagctgggactacaggaacgagccaccatgtccagctaattttttgtatttttagtagagatggggtttcaccatgttggccaggctggtctcaaacacctgacctcaagtgatccactcgcctcagcctcccaaagtactgggattataggtgtgagctacgtgtccggcctttttttaaacaacaacaacagcaacccagctagggtctcactgtcaccacaggctggagtacagtgacatgatcatagctcactacagcctcaaactcctgggctcaagcaatcctcctaccttagcctcccaaagcactgggattacaggcacgagccactgcacctggccctgagaaatgtttacaaaaataaattggaacatgccatccccttcttcaccactaaaaccttccagaacttcccattgttcttgaaataaaatctaagcattttactatttttacagggtcctgtttgggtgagtcttattcctcccttcactgagcaccagttttggggtgtttttttttttttttttgagacggagtttcactcttgttccccaagctggaatgcagtggtgtcatctcagctcactgcagcctctgcctcctgggttccagtgattctcctgcctcagcctcccgagtagctgggattataggcacgcaccaccacgcccggttaatttttgtatttttagtggagacagagtttcaccatgttggccaggctagtctcgaactcctgacctcaagtgatctgcccacctcagcctcccaaagtactaggattacaggcatgagccactgcacccggcctagctttatttacattttgtgtttttgagacagagtctcactctgtcgcccaggctggagtgtcgtggtgcaatcacagctcactgcagcctccaactcctgggctcaagcaatcaccctgcctcagcctcccaagtagctgggactacaggtacacatcaccacgtctgactagttttgttttgttttggtagagacagggtcttgctatgttgcccaggctggtcttgaactcctgggctcaagcgattctcctgcctcagcctcccaaagtactgggattacaagtatgagccactgcccctggcctctcaagttcttaagtgccccaaagcctttgtttttgctgccacttctgcccaaatcaaccttctggaagattcacacagctcaacgttgcctcaaaacagaggcttccccagaccactgggaagcaaccctttacccacctagtcatgctttactattactgttttttcgtagcatttaccactgtcaaagattctttttttttttttttttctttcttagagtcttgctctgtcacccaggctggagtgcagtggtgcaatctcaactcactgcaacctctatcttccaggttcaggcaattatcctgcctcagcttcctgagtggctgggattccaggcacccaccacctggctaattttttgtatttttttagtagagacgggggtttcaccatgttggccaggctggtctcgaactcctgaactcaggtgatctgcctgcctccgcctcccaaagtgctaggattacaggtgtaagccactgcacccagcctgagattttcttatttactatctatcgtaatctgtctgtcccacaagaacaaagcagggattggcacacattttctctaaagaaccagataaatatttcgggtttcatgagccacacattctatgccccaactactcaaacctgccatcatcaaagtgcagaaatagccatcaccaatatgtaaatgagtaggtatgactgtgttccagtaaaactttatttataaaaacagatggccagccagatttggccttcaggccttagtgtgctgactcctccacagactacaagcttcagaggaatgcaaatataggttgaattaacatataggacatgaggccaggcatggtggctcacacctgtaatcccagcactttgcgaggccaagtcaggtagatcacctgaggtcaggagttcgagaccagcctggctaacattgtgaaactccatctctactaaaaacacaaaaattaggccagacacgatggttcacacctgtaatcccagcactttgggaggccaaggcaggcagatcacctgaggtcaggagtcgagaccagcctggccaacatggtgaaaccctgtctctactaaaaatacaaaaattagctgggcatggtggcgtgcacctgtagtcccggctacccagaaggctgaggcaggagaattgcttgaacccaggaggcggaggttgcagtgagccaagatcgtgccattgcactcaagcctgggcaacagaacaagactctgtctcaaaaaaaaccctcaaaaattagccgtgtgtggtgtcatgcacctgtagttccagctactcaggaggctgagacaggagaattgcttgaacccgggaggcggaggttgcagtgagccaagatcacaacactgcactccaacctgggcgacagagcgagaccctgtctcaaaataaataaaagtaaagttgtttttcccccaacaacagtgtcatttccatttcacaaacagaaacccaaaccagatcaggttacaaacctagttttgtctccagttcctgggtcatttgctttgttcacttgaccactagaaatctcaaacaaagggccaggcacagtgactcacacctgtaatcccagcactttgggaggccgaggcaggtggatcgcttgaggtcaagaatttgagaccagcctggccaaaatggttaaacctcatctatgctaaaaatatgaaaattagctgggtgcagtggctcacacctataatcccagctacttgggaggctgaggcaggagaatcgcttgaacccgggagtttgaggttgtagtgagctgagattgtgccactgcactccagcctgggcaacagagtgagactccatcaagaaagagagagagagaaagacacacagagagagagaaagcaagagaaagagagagagagacagagagagagaaagagagagagagaaagagagagagagaaagagagagaaagagagaaagagaaaaagagagagaaagagagaaagagacagagagagaaagagagaaagagaaaaagagagagaaagaaagagagagagaaagagagaaaaagaggaagagagagaaagagaggaagagagagagagaaagagagagagaaaggaaagagaaaagaaaagaaaggagaaggcctggcgcggtggctcacgcctgtaatcccagcactttgggaggccaaggcgggcggatcacgaggtcaggagatcgagactatcctggctaacacagtgaaaccccgtctctactaaaaatacaaaaaaaatagctgggcgtggtggtgagcacctgtaatcccagctactcgggaggctgaggcgggagaatggcgtgaacccgggaggcggagcttgcagtgagccgagattgcaccattgcactccagcctgggtgaaagtgtgagactctgtctcaaaaaaaaaaaaaatgaaaggagaaaagaaagaccaaacaaaggtcgagtacagtggctcatgccttacctgagagaaggaagtggagcctctaaaagaaaacaggtacagatttcatgggcattcactctgcctccacctctcagcctccaaagtcacatttcctaatatgccacaagacagacttgccaggccaggcatggtggttcatgcctgtgatcccagcgctttgggaagctggggcaggattgcttaaggacaggaatttgaggctgcagtgagctataatcatgctactgcactctagcctgggcaacagagtaagtccacatctctaaaaaacaaaaaataaatttaggccgggcacggtggctcatgcctgtaatcccagcacactgggaggccaaggcaagtgaatcacttgaggtcaggtgtccgagactggccaccatggcgaaacctcatctctactaaaaatacaaaaattagctgggcatggtagcaggcgcctgtaattccagctactcgggaggctgaggcacaagaatcacttgaacctgggaggtggaggttgcagtgagccaagatcatgccactgcactccaccctgggtgacagaacaagactctgtccccaccaaaaagaaaaaatgtaaatgaaaaggaaagatctgccaggccatagctccttgcttcccaggccacattccagggaggccaggagaggcccagagaccagtctaaccgaggtccaggcagcccagagcacgaaggctggtggagagctggccacgtgtcctgagctacggtcagtcagaaggctgaaggtgagtcatcccagacaccgtgctcagtgccaggcccatcagaggccctgggcaggaacagcagcactcagtaacaatggggacactttaccacccttaccctggaagggcctcagaagcactctctccaggctcgacttgcctaagctaggaatcagatctgcagaaacccaagtcccatagcgtgtgctgggtagagccgcctactcctcgtggggcctttgagcaggcagacagctctctgttggggatcacaagaggcttgctgccaagccctgtgggtttttccttcaaagagcccttgagtcagctgatctgcccctcctgggcccctggcccaggtcaccctcacctttctgctggatgcctgcccagcctcattcctgggctgctacttggccccctcaccatccattcaccacggaagaagttcatcagaacccaaatctgatcatgttagctcctccctacctcaccgaatcccctgaatggcttctcagggctcttagggtaaacccaaccctaccttctccgctgcagcccacaaggcctcagtgcccagccctgtcttgtcctttcagctcctgctgcccacctattaacccactccacttgagccacatcatggacagttccagcctctttctgcctaagacatgtggtggccagcctccaagaaggccctcaatgtctcttgcctcttggtattcatgccctgccaagccttcttccatagtcagggccagtttatgtggccaagagaaggtgagtgacttccaaggctagatcataaaaggcattgcagcaccaccttgtgttccccaggaaaccagccgccatattgtaaggatgctcaaacagccctgcagggaggcccataggaagagaaaccaatttatcagccaggtgagtgagccatattggaagtagctgcactccagcccccatcagacctgcagatgggtggaaccacagatgatatgtgactgtaacctcatgagagacgcctaacagagctgctcccaaattcccagcccacagaaaccacaggatataatgcatgggtgttgttctgagccactggggtttgaggcttgttgttaatgcagccatagatatgtattgcaaggcttctgcatgtgctgtttccttagcttggaaagtcctattctacacgcccagttctcctgcttggataatctacaattattctccctattgtggctcaaccatgacctccttcaaggagcctttcctgacctcccctagccctttcaggtctttgttccatggtcttttagaagtcaggccctttctttcagagcctttaccccagctgttgatcatatattttgagatttacatcagccatacccccaccgatgcccagtgtgtagcaaagcacccaggatgtagttagcacccaataaagtgttatggagccctacacagatgagagagggtacgaagcctgttcttcccacattaaatgctcagtttacaaatatccatcaaaattaccaacaggctgggcagtggctcacacctgtaatcccagcaatctgggaggccgaggcaggtggatttgcttgagtataggaattcaaggccagcctgagcaacatgacaagactcatctctgcaaaaaaaaatacaaaaattaggctgggtggatcgcctgaggtcaggagttcaagaccagcctgaccaacatggtgaaaccccttctctactaaaaatacaaaatcagccaggcatggtggcacatgcctgtaatcccagctacttgggaggctgaggtaagagaatcgcttgaacctgggaggcagaggttgcagtgagctgagatcacgccattgcactccagcctgggcaacaaaagcaaaactccctctcaaaaaaaaaaattagctggacatgatggcaggcacctgtagtcccagctactctggaggctgaggtggaaggatcacctgagcccaaagaggttgaggctgcaatgagccatgatcacaccactgtgctcccacctgggtgacagagtaagaccctgtctcaaaaaaaaaaagacaactcagacacatcacatatctaaatacgaaagcaaagtcaggaaagcttttgaaataaaacacagaacatctatgtgacttgtggacaagcaagtgtttcttcggcaggacacaaagcacattaataaaagaaaatatgctggactctatgaaaatgagtttttgggtttttttttttttttttgagacagggtctgtctcccaggttggagtgtagtggtgcaatcacagcttactgcaatgttggactcctgggctcaagtgatcctctcacctcagcctccagagtagctagtagctggggctataggtatgcaccaccacacctggctaatttttttttttttttggtcgacacagggtcttactatgttgcccaggcaggtcttgacctcctggcctcaagtgacccttccaccttggccttccaaagtgctgggataacaagtgtgagccaccatgcccagctgaaaatgagttttggttcatcaaaagatgccattaaaaaggaagccacagacagccgggcacggtggctcacgcctgtaatcacagcactttgggaggtcgaggcgggtggatcatgatgtcaagagcttgagaccatcctggccaacatggtgaaaccctgcctctactaaaaatacaaaagttagccaggcgcagtagtgggcaccagtaatcccagatacttgggaggctgaggcagaattgcttaacccaggaggcggaggttgcagtgagccgagatcgcgccactgcactccagcctgggtgagagagcaagactccatctcaaacaaaaaaataaaagccacagacatacgtctgacaaaagactcatacctataatacatatagaactccttcaacttaatgacaatcacttttttaccaagtggctaaaagagctaaataggcacttcacaaaagaggatgcccagatggccaaggctaacgtgggaagctgctcaacttcattagtcatcagggaaatgcaaactcaatctgcaatacaatatcaccctcacacgcacacacacaaatgaaaaaaaaatttttttcaagtattggcaaaaccagaactcttctatgctgctggaggaagtctcaaatggtatagccgctttggaaaatgatttggcaacatttgctaaagccaagtctactgctgcccaggacccaccaatcccatgcctggaatgagtgtatatatctaccaattgacatgaacaaggaatgttcataatagtttactcacaatagccaaaagctgaagactacatgaacaataatagaacagataaatagttacttattcacatggaatattatacacaagggtcataaactttcttttttagaggcagggtcttgctgtgtcacccaggctggtgtgtagtgatgtgatcatagctcactgcagcctcaacctcccaggctcaagcaatccccctgcctcaggctcccaagtagtagctgagactacaggcatgcaccaccacacccagctaatttttttctttttttgtaatcccaaagagttgagattacagacatgagccactgcgcccagcaaaaaataaaaaaaatcaaaatttaagttagctgggcatggtggcacaagcctgtggtctcagctactcgggaagctgaggtgggaggatcgcttgagccctggagataaaggctgcagtgagctatgattatgccactgtactccagcctgggcaacagagcaagaccctatcttagaaaaaacagacaaacaaaaaaagtgaatttcaaaaaccttatgctgtatgaaagaaaccagtcataggagggtacatactgtgtaattctgattatagaaattaccaaggcacttatcttcatttttctcacccacttcaaacttaggcttccttttttccttccaggccacttacaccctgccttcctccctcaactcttcccagcctccttctgcctgccagggtccatgacatggccattgtccatgaaagccacaagccctagagaaaaaatgccagttacaggccagagacttgcccacctcctggagaatgacgtgaaaatacacagcgtctgctcctgaactgcaaagaaagtttccctgtctacactgcggtgagcaggaataaaagctaggcctgccctggccttaaattaagccagagggatgtcacgtgaggagactccttcctggaaaagaccaccaattaaccacagctgattctccaaaagcaatctgcaagttggggatcattagttggtgcaaaggtaattgcgatctttgctattaaaagtaatgagctgagtgcagtggctcacgcctgtaatctcagcactttgggaggccaaggcgggtggatcacgaggcaggtagatcacttgaagccaggagtttgagaccagcctggctacatgatgaaaccccgtctctactaaagatacaaaaattagctggacgtggtggtgggcacctgtaatcgcagctcctggggaggctgaggcaggagaatcacttgaacctgggaggcggaggttgcagtgagccaagatcgtgccactgcactccagcctgggagacagagtgagactccatctcaaaaaaaataaagtaacatactcattttatagatgaggccagctgacagttgtcatgtgccatccccaaaagctacttgggttgttgagtgtgggatgtgagattcaaatctgcttttcctaacttgatagtatgcacttttaacagttatgccaccacaattgccgacaacaatgaatcacatccgacccacttcatttccctttttttggacagatttgtctattcttggataagacattcaaggaagggtggtggtattgctttctttgaatttcttatccgagaatagttaaatctgtccaaaaaaagggggaaggtggtggtattgggtgtctgaattttgggcaagtatgtcagctttgtagacaaatgggaaaaaatggctagatatgaggatggagagacggtttagaaaccgtttgtaggttttttgtttgtttgtttgtttgtttgtttttagagaggcagtctcactctactgcccaggctggagtgcagtggtgccatcatagctcactgcatcctccaactcctgggttcaagtgatcctcctgctttgccctcctgaatagctgggactataggttcctgctaccatgcccaactaatttttaagattttttgtagagctgggggtgtctcactgtgttgcccaggctagtctcgaattcctggcctcaagcaatcttcccgcctgagcctcctagagcactggaattacagacatgggccacaccacgcccatccagaaaccctttgaagactgctaatgaaacaacagttccaggcaatggttatccatggatgatcaaacctttagggaaacgccaagtggggaatttacaaaggcatggtcaggcggatggcatccgaatccctggatcattcttagttatcagtgaaaagtggaaagaaaggccaggcacagtggctcatgactgtaatcctagcactttgggaggctgaggcagaaggatcacttgagcccaggagttccagactagcctgggcaacatagtgagaccttggttctacagaaaggtttttcggtttttgttttgttttgcttttgagatggggggtctcactctgtcacccaggctggagcgcaggtgggcagtctctgctcactgcagcctctgcctcctgggctcaagcaatcctccctgctcagcctcctgagtagctgggactacaggtgcatgccaccatgcccagcttttttttttttttttttgttttggtagacacagagtttcaccatgttgcccaggatggcctccaacctctgtgctcaagctattttcccacctcagccacccaaagtgctgggattacaggagtcagccaccacaccctgcccaaaaaaggtattgtagcatttttttaagtgttgctaccttttagagataaaaaaatggagtatttacaaatgaaattatttgaggcctcagatttgcttcaaaatatccagtgaggctggctgggtgtggtggctgacacctgtaatcccataatttggggaggccaaggtgggtggattgcttgagcccaagagttggagaccagcctaggcaacacagcgaaacccttctttacaaaaattagccagacatggtggcttgcacctgtagccccagctacttgagaggctgaggcaggaggatcgcttgggcctgggaggtcaaggctgtagtgagttgtgatcacaccattgcactccagcctgggcaacagagtgagacactgtctcaaaaaaaaaaatcctttgaataataattgattcaggcaagaatgaatgctgaaagagtgaaagtctgatgaataataggatatttatagagtctccacatacctccccacaagaaacttaataattacaaaccggaaagcagtaactttatagcagagacacgctggggtcttcctgccaaaaaggcacaacctgaatctaatcataaggaaacagcagacaaacccaagttgaaagacattctgcctaataactaacctacattttgttaaaacgtcaaggtcgcaaaacacaaaaaggctcagaaattgatctccgtgaaagaaactaaaaagacaactggaaacaacaactgatctgggattttcttttgctataaaggtcagtgatgtgacaatgggtgaaatctaattaggtttgcagattttctgcttttgatcattttactgaggttatgttagagaacgccttgttctggccaggtgcggtggctcacgcctgtaattctagcactttgggaggctgaggcaggcggatcacctgaggtcaggagtttgagaccagtctagccaacatggtgaaaccctgtctctactagaaatacaaaaattagccgggcgtggtggcatgcgcctataatcccagctacttgggaggctgaggcaggagaatcacttgaacctgggaggtggaggctgcagtgagccaaggctgcaccattgcactccagcctgggcaacaagagcaaaacgctgtctcaaaaaaaaaaaaaaaaaattgttgagatgggccgggcacggtggctcatgcctgtaatcccagcactttgggaggccgagacgggcggatcacaagttcaggagtttgagaccagtctggccaacatagtgaaaccctgtctctacaaaaaaatacaaaaaaaaaaaaattagccaggcatggtgggcacctgtaatcccagctactcgggaggctgaggcaggagaatcacttgaacctgggaggcagaggttgcagtgagccgagagccgccattgcactccagcccaggcgacagtgtgagactctgtctcaaaaaaaaaaaaaaaaaagaaagaaaagaaaaattgttgagatagtaatcaaaagagctcagttactcagaggctgcagaaactagaaatatgaaatctagaattgcactgcccaatattgtagctaatgatttgttaattaaaattcaataatatgtaaaattcagcccctgcctgcctcacattagtcgtatttgtaatgctcatgacagtgctgctctgaattatggagccgagaatgcttcttagaatatggtgcaagggccaggcacagtggctcacacctgtaatcccagcactttcggaagccgagatgggaggatcacttgagcccaggagtttgaggccagcttagggaacatggcaaaagcccatctctacaaataaaaaatttaaaaagtagccaggcttggtggcaagcgcctacagtcccagcttctcgggaggctgaggcaagagaatcacttgagcctgggaggttgaggctgcggtgagccgaattggcaccactgcactccagcctgggtgacagagtgagaccctgtctccaaaacaacaacaaaacagaatatagtgcaaagactatatatatatatatatatatatatatattttttttttttttttgagacagagtttcgctcttgttgcccaggctggagtgcaatggtgcagccttgactcaccgcaacctctgcctccagggttcaagcgattctcctgcctcagcctcccaagtagctgggattacaggcatgcgccaccatgcccggctaattctgtatttttagtagagacagggtttctccatgttgatcaagctggtctcaaactcctgacctcagatggtccacccgcctcagcttcccaaagtgctgggattacaggcgtgagccactgttccccggccaaggactacatatttttaaattattaggggttcctggtaagaaacacacatttctaggttcattccagacctgtttagtcagaatctctgaccatagagcttgagaatttgcatttaagcaggttcttccaggtcattcctttgttggtccctattaggcaacagcctccctaggggaaaaaggaggtgaaagtcatcttgtgtttcctgctggaaggaccactttaatttgggctccaagatttgagagctatcaacaaatgggatcttcagatccagatattgaggaggatcagatatgattgtgggcccggcgcagtggctcatgcctgtaatcccagcactttgggaggccaaggtgggtggatcatgaggtcaggagttcaagaccagcctggctaacatggtgaaaccctgtctctactaaaaatacaaaaaaattagccaggcatggtggcgggcacctgtcatcccagctacttgagaggctgaggcaaggagaatctcttgaacctgggaggcggaggttgcagtgagccgagatcgcaccattgcactacagcctgggcgacagtgcaagactccatctcaaaaaaattagctgggtatgatggtgcacgcctgtaatcccagctacttggaaggctgaggcgggagaagcgcttgaacctgggaggcagaggttgcagtgagccaagactgcgccattgcactccagcctgggtgacaagagagaaactctgtctcaaaaaaaaaaaaattagctaggcgtggtggtgcgtgcctgtaatcaccgctactagagaagctgaggcggaagaaactctcgaacctgggaggtggaggttgcagtgagccgagactgtgccactgcactccagcctgggcgatagagtgagactctatctccaaaaataaataaataaataatcatttttttgagacggggtttcgctcttcttgcccaggctggagtgcaatggtgcgatctccggcttaccacaacctctgcctcctgggttcaggcaattctcctgcctcagcctcccgagtagctgggattacaggcatgtgccaccacacccggctaattttgtatttttagtaaagacaggatttctctatgttggtcaggatggtcttgaactcccaacctcaggtgatccgcccgcctcggcctcccaaagtgctgggattacagacgtgagccaccgcgcccagctgaaaaacattttaaaaagatataagtgtggtcttcagtgactcactgggttccaatcctggccccttgactcccatgctacttgaccttgggtgaattacttaacctctctgtgcctcggtttctttatctgtcaaaaagccaataatagcacctactctataggattattgtgaggattccagaagtttgcagatgtcaaatgattctcacagtgcccagcacacgagcacacattagactttttattttttgagacagggtctcactctgttgcccaggctggaatgcagtggcatgaccacagttcattgcagcctcggtcacctaggctcaaagaatcctcccacctcagcctccagagtggccaggactatagacacgttccaccacaccagggtatatatgtatttatttacttacttttacagatgaggtctcactatgttgcccaggctcatctcaaactcctggccccaagtgatcctcccgcattggtctcccaaagggctgggattacaggcatgagccaccatgcctggccctattttcttttctttcctttttttttttttttttgagacagagtcttgctccatcacccaggctggagtgcggtggcgcgatctcggctcactgcaagctccgcctcccaggttcacgccattctcctgcctcagcctcccaagtagctgggattacaggtgcccaccaccacgcctgcttaattttgtatttttagtagagatggggtttcaccatgctggccaggctggtttcaaactcctgacctcaggtgatccactcgcctcggcattccaaagtgctgggattacaggagtgagctcccacacctggcactattttcttttcttttttttatttgtttctgttttgttttgtttgttttggtggtctaaaataaattttttaattgcacatttgtgtcttgggttatctgtggggtgagaaacctattcctcacttccaatcccagctatccaggtacaatctggtgttgtggtctggctgtgggcaaggggtacaggtgggtgcagagctggccctcgagtctgcaccaacgtcttcaaggcagggagctcagaccatggttgtacttgcactgctttggggcctcattgaagccctcacacagggacaggtcattctcagtggtcgaacagtccaggaactgcctgatcttgtaggtgcagagccccatctgtaggggctgggaggcagcaccggtgggggtctgactggccagtcggccacactgtggcttccccaaggcctggtggctgtggtgagaccttattatattagatattagatattattatattagatattagagacggcaatggcggcagcagttctgtcgcagggacaaatgccgcccccccttttttttttttttgagatgcagtttcgctcctgttgcccaggctggagtgcaaaggcgcgatcttggctcactgcaacctctgcctcccgggttcaagcaattctccagcctcagcctccccggtagctatgattacaggcgctcgccaccacgcccagctaatttttttttttgagacagagtctcactctgttgcccaggctggagtgcagtggcgcaatctcggctcactgcaacctccatcccccgggttcaagaattctcctgcctcagcctccctagtagctgcgactacaggtgcgtgccaccacgcccagctagcttttgtatttttagtagagacagggtttcaccatgttggccaggctggtcttgaactcctgacttcatgatccacccgtcttggcctcccaaagtgctgggattgcaggcatgatcccaggtgtaatcccaaaattaggcacatggcctaattttgtatttttagtagagatagggtttcaccatgctggccaggctggtttcaaactcttgaccttggctgggcacagtggctcacgcctgtaatcccagcactttgggaggcctaggcaagcagatcacttgaggccaggagttcgacaccagcctgaccaacatgatgaaacccccgtctctactataaatacaaaaattagccaggcttggtggcacatgcctgtaatgccagctactcgggaggctgaggcaggagaatcacttgaactcaggaggtggaggttgtagtgagtcgagatcacatcattgcactccagcctgggcatcagaataagactccgtctcaaaaacaaaacaaaacaaaacaaaaaaactcctgacctcaggtgatctgcccacctcggcctcccaaagtggtgggattacaggcatgagccaccgtgcccggccctattttattttcttcctagcacttaacactcactgaaatgaccatcatttgcttttgttttatttattcaacaagtatttactgaggacctactgtgtgtaggcattccaggcagagggaacagcaggtgcaaaggccctggggtgggaacatgccaagtagtgtttaagatgttagagatagccaggcatggtggctcatgcctgtaatcccagcactttgggaggctgaggtgggaggagcactgagcccaggagtttgagagcagcctgggcaacatggtgaaaccctgtctctacaaacaatacaaaaaagcaggccagtgtgttggcacatacctgtagttccacctacttgggagattgaggtgggaggatggcttgagcccaggaggtcaaggctgcggtgagctgtgattacgtcactgcactccagcctgggtgacagagtcagaccctgtatcaaaaaaaaaaaaaaagttagagagccataaatagccaggcaagttggctcacacctgtaatctcagcactttgggaggttgaggcaggcagatctcttaagcctaggagttcaagaccagcctgggcaacatggaagaatcatgtctctacaaaaaaagaaaattagcaggcttataatcccagttactaggaagcctgaggtggaagtatcacctgagcccatgagcccaggaggttgaggctgtagtgagctgtgattgcaccactgcacttgagcctgggtaacagagtaagaccttgtctcaaaaaaaaacaaaaaaacaacactggagatacattagtaaataaggcaggtgcagtcctatattcacagtgcttgtattttaatgggggtagagacagataaattgatacatattaggttggtgctaaaatcattgcggtttttgccattaaaagtcattgtaggctgggcacggtagctcacgcctgtaatcccagcactttggggggccgaggtgggtggatcacaaggtcaggagattgagaccatcctggctaacacggtgaaaccctgtctctactaaaaaaaaaaaatacaaaaaattagcctggtatggtggcgggcactagtagtcccagctactcaggaggctgaggcaggagaatggcgtgaacccaggaggcggagtttgcagtgagccgagatcgggccatacactctagcctgggtgacagagcgagactccatctcaaaaaaaaaaaaaagtcattgcggtttttgccattaaaagaaatagcaaaagtcattgcaatttttgctattaaaggtaatggcaaaaaccgcaatgacttttgcaccaacttaataatatatactgccaggtaataagcaagtgactcctttctgaggaggtggcatttgagcagagtcctgaagggggagatagagaaccctgtgggtacttggggaaaatctattgactccagcctggcctgtgcctttttcccccaccccaccccccatcccatctagggttcaggtttccaaacagaggttgttgtctcaactgctagagaaggggaattccgatgggggttgcaggccctcagcctctgcggtctgccttctctcccactggctgtcctagtctttgagctggtgttgctgtgtggggctccagcttgggtgcctagggtcccccatcaaagggttcatgcctgaaatcccagcactttgggaggccaaggtggaggcaggaggatcgcttgagcccaggagttcgagaccagcctgggcaacatagggagaccccccatctctacaaaaaaaaaaaaaaaaaaaattagccaggcatggtggtgcatgtctgtggtcccagctacttgggaggctgaagtgaaccatgatggcaccaactgcactacagcctaggcaacagagcaagaccctgtcttaaaaaacaaacaaacaaaaaaactctagacttttcttcaaaggagccactgagccggctgcctgcagacaaaagagaagagtatcaccagggaacccaccgagggacccacccgaggctgcatcctatcttggcttctcctggttcttgatgaacttcgtggctcctccttccatggcaaagagggagctaagtggcctctctctgtctttttttttgctctgctctgtcgcgcaggctggagtgcagtgccgtgatcttggctcactgcattctccacctcccggattcaagcaattctcttgcctcagcttcctgagtagctgggactacaggcacccgccaccacacccagctaatttttgtattttttgcagagacggggtttccctatgttggcaggctggtctcgaactcctgatctcaagtgacccacccacctcagcctcccaaagtgctggaattataggagtgagccactgcactcagctgagtggcctttctctagcccagtggtggatccagtatggtctggagtcagcctgcttgggttcaaatccagacaggcgctaccccgactagcgctgtgtgactctgagcagtttgcttgatctctctgaactcacacctccataagagtttatagtaacttccacctcctgagcagtcaagtctttatgcctggaaagtgctcggtgaagatcagccattacttttgggaacaccgtgtctaagggtgggtatctgggttctttgtagccccctcaaaccatctctccagctccccgggaggcacatacaattgggaggatgtaggagcctcccaccacctgccaggctgtctccttcagagaaagcagggagatcccagaccgagttaatccctgggaggtgcaggtgagttgcccctgggaaagatcccggttgacctctgttttctcctggctcaggccgggttaagggtgtcaggagcacagaatgggaaggttggcaaaggatgagttactcaggcagcagcccccctcctgttccatccagcccagccatggggcgctcctgggggaaattgctccccgaaaagacacaccaaccacaggaaacagaaattgaaccgtttattagcctaggtctgggtttcaggcattgcggaggcacgtctggggagctctatgaggggaaacaagcccctgactggctccttgccccccaaagacccgctcccccaggctttgcattcacaagaaattactctgaggcatgaggtttccttccccaaggtgagctgcaccccagctctccagtgggaggatgggccagcaattccaaaggggtctgggcaggaccagagctccccgactttggcagcttcaacacaaacatgagcagacaggacagcattcattctgggggaaatgtgacgaggagaggagggtcacagacatcacgcctatgtgcacacgcgcgcgcgcacacacatacacacacacacacataaatatacgtttgtaccgtaacatcccttccattatccacaggtttttgtgaagtccttctggggggttaggggagagtgtccccaggaaatgtccctagccactgccacccccatgctccattctatataacttgaaagaagaaggccgggcacagtggctcacgcctgtaatcccagcaattggggaggccgaggcgggcggatcacttgaggtcaggagtttgagaccagcctggccaacgtagtgaaaccctgtctctactaaaaatacaaaaattagccagacatggtggcaggtgcctgtagtcccagctactcgagaggctgaagcaggagaatcgcttgaacccgggaggtggaggtggcagtgaacggagattgaaccactgccacctcagcctgggtgacacagtgagactccatctcaaaaacaaaacaaaaatcttgaaactgtctcaaaaaaaaaatcttgaaagaagacacagcggggttcttgaaagaagacacagagaaggctcaaggcttctctctgccttgctcaggagacctggtaccttagctggggctgcaggtgtggagctgagaatagcttggggggtggctgtttttgaaaggagggtgtctgtgcaaatatcacacccagaattttctcaagttgcgccttgcatcaagagtcccaaagtcctccccagccacccaaactcgtttttctcacttttggtgattattctgtgccccaaatagtgcaactgagcaatgaggtctgagaatgaggaatggacctcagccgccatcccctccccacctccagccgtggtttccgggcctcagagagacggggagaagtcgtcaagtggcagctgatgaaatttggggaagctgtggatttgggctctggatggtcagagaggaggcctctagctcctcaggacagtggttctgtagtcgcacgaagttgcccagagaaggtggcaggaggaatacattcgaaaaggagaaatcggtgcaggactaggggccagggaagaaaatgcagaaattctttgtaccgccaggtgaggtggcttacgcctgtaatcccacactttgggaggccaacacgggcggatcatgaggtcaggagttcgagaccagcctggccaacatggtgaaaccccgtctctactaaaaatacaaaaaaaaaaaaaattacctgggcgtggtggtaggcacctgtaatcccagctactcaggaggctcaggctggagaatcgcttgaacctgggaggtggaggttgcagtgagctgagaccgtaccactgcactctccagcctgggcaacagagcgagacttcatctcaaaaaaaaaaaaaaaaaaaaaaaaaaaaaaaaaaaaagccgggcacggtggctcacgcctgtaatcccagcactttgggaggccgaggcgggcggatcacgaggtcaggagatcaagaccatcctggctaacacggtgaaaccccatctctactaaaggtacaaaaaattagccaggtgtggtggcaggcgcctatagtcccagctacttgggaggctgaggcaggagaacgacatgaacccaggaggcggagcttgcggtgagccgagatcacgccactgcactccagcctgggcagcagtgcaagattccgtctcaaaaaaaaaaaaaaatcctttgtaccaggtggtaaagtgctcctgccctgagctccccttaaatgctgcctgccctcaccctggctcttcacaggtcccctgccctggcctccccaggatccagttctaaaggggtcacactagccactggactggccctcaggaccgcactgcaacactgctatgtgactagtcagtgccttatctggcctttccaggtgtgaaatatttgcaacatcacccaggtctgtggggcgggggcatctggctcagtagccccaagtctctatctggggtcacccagtggcctctccatgaacccctctgccctggcctggttgttggtccacccccaccctcagaccaccgtgttgccctccagaaacgtgggtgacgtgggcatgtgcatgcccctctccagggagctggagctgcggagtggcaggaggtggtggcccggggtcccgccccgcctccgtccttgcacccccacccccggcctccagcactgcagcggccgaagcacctcccgccgcaggtcccggctgcgccacgtgtagatgacggggttgagcagggaattcagggtggagacggcgaaaaagtagtgggctttgtagaggatcgggcaggagtggacgggacaggcatagtccagaaggaggatgctgaaggcgggcagccagcagacgataaagacgcctagcacgatggtgaccgtcttgagcagggctagcgtctgcggggcggccatgtcagcgtggcttgagcggaccacgcagtagatgcgcacgtacagggccacgatggccaacaggatgatggagaagatggtcaccacgcacagcacataatgcttggcgtagagaggcaggacagtggagcaggcctcgaggtggcccaggcagttccagccaaggatgggcaggccaccgaggaccagcgagatgagccacgaggccccgatgagcagaagcatgcggcagctcttgtcgctgccatacagcttgaccttggcaatggccacgtggcgctcaatggcgatggccaggaggctgaagacagaggccgagagcgtgatgaaggcagagccctcccgggcaaaccactgcacaggcgtcagcctcagcgtgacagagccagagagcaaggtattggctacgaaggccacgcctgccagtagatcggaggcggccaggttgcccagaaacaggtacattgccgagtggaacttgctgtttcgggccaccgcaatgagcaccagaaggttttccaccacaatggcgcaacagaggatgacgatgaaggccgaggccacctggcgggaggtcgtctcctgcgtttccagcgtctccttggtataattatagtgttcctggaccttgttggggttcaggtactccgagtacaagctgcccatggtggggctcagaggcctgctggggccatggggctttcagaactgcagagaagacagacagacagacagacaataggtcagagctgtggctgctacctgggctctggcctcggatgggctgagattcaatttcctgctctgttactcttcgaggaagggccacatgaattcagaatcatcatcatccccacttacagacgggaaacccagagagattaattcactttcctaaagtctcaaatttaaccagcggcagggccagagagactggctctgcggcctctataagccctaggctacgctctttcttatttattttatttatctatattttaaagacaaggtcttgctctgtcattcaggctggagtgcagtggcgcaatcatagctccctgcagccttgaactcctgggctcaagtgatcctcccacctcagcctcccacctcagcttcagctacaagcacatgccaccacgcctggctaattttttttttttttttttttttttgagatggagtctccctctgttgccaaggctggagtgctgcggcacggtcttggctcactgcaacctcctcctcctgggttcaagtgattctcctgcctcagcttcctgagtagctgggattacgggcacctgccaccaggcccagctaattttttttttatttttagtagagacagggtttcaccatgttggccagcatggtctcgaacttctgacctcatgatccgcctgcctcggcctctcaaagcgctgggattaccagtgtgagccaccgggcccagccgcctggctagtttttttgttttttagagattgggtctcactgtgttgtccaggctggtcctgaactcctggcttcaagcaattctcctcggcctctcaaagcaatgagattacaggtatgaaccatgacatcttgcctcttttaattttcattattattttctagagatagggtcttgctctgtcacccaggctggagtgcagtggcatgatcatagctcacagttgtctctactcctgggctcaagtgatcctcctgcctcagtctcctgagtagctacacgctttcaaagggaaagaagctcccccaaatggcatgaaaaatataatgtggacttccagaaaccttgcccacctacccagagagcaagccctaggcaggtcctggagggtttgtctcttttctggaacacacaggcgcctgcgccctcatgctgacctgggtcagggagagtctcaccactgatagctccgtgccctgctcattcattaccacccactaacgctggatttcaggctgggtctaagccttgaggccacgggtgctcccaagataaggtcttggggagacaccagggcggccctgagattcaaacatcccagaggtcacaccatcttcaaggacacagaccttgaaggcaatccagaatttgctcccattccacctctgaaacactgggcaagtccctagacgctgtctcagcctgaacctccttatctgtgcaatagagagaagaaagcccacttcatgggggtgatgggaaaatccttttaaatgacgcatgaggcacgtttagctcatagtaagcactcaacaaatactgccaaatgttattagctcccctctttcctccagtcctttgggaagggaagggatgtaagccaaccagacgagatctccaacagcctgttctcatcagcaccatctagctctgccctgggacagaaggtcctgccgggatgggcagggcgctggcaccccctccccagccaggatgaaatccagatgtgaggcccctggaacaaacagggtggagtcctcactctgcagtcacatccggtgtgaggaaggcgggatgtagggggagtcaggatgggagagaccccatctgggaggtcctggctgggaggatggggcagctttgctgaagtcatgtgagccgtgaaggggtgtgcagccccgccgggagggggtaaggcatttgttccatgaaaacctgagtcacccccccaaccccctcccatccctcccctccaccctcttccatccctccctctaccccctcccatccccccccatcgccacccaccaaggaaaactgagccgtggtgggagggggcggggagaggcgctcctcggcagagaggatgagaggcagacaccatggccttcccccagcttgggggtagggttaggggttgtcagaggcgccagtgcagtgtatgcctttcatgaagggagaggaagttccagccttagctaaatgggagggaggggggagagtagggggagtcctcctcaggtccctagaaacacgtctggcaaggactgtgtgcaccgttccagaaaagtctggttaggccagttctcctgagcccaggagtgatggaggtttccggagtcacccagccatctcagtccctggccgccccctccaaggggcatcctggcccctggctggatagaggcagctgctcccccagggcggagggacatccgtcctagtttgggaacagacaagggcttgtgcacgtccccggggactgctgcccctcccagatagccacacagaggccccttgttcccttgctggacgcagccccgggcatcttgatgccctctgcacgctgcagccagtcccaggcaggcttgggcccaggctgcggctggatcagacacagctgatgggccggaaacagcccatgctctgattggctcattttcaatccaagggcactgagcaatttgcctattggcccgggctttccatcttctgcctctgattggtccagttgggggcgctctacggccagccctaccgatggggtcctttataggcgacgggagctcaggctttctgaggatagagttaatgctatgtggacgtccctagggggagtttgaaccgcagcctgacctctgggtcaccccgaccagacacccccaggctgccctggcctgctgggcccctcctggggttcataagtgagaatcaaggtccctttccaggcctggggagcacgctgtgcagtgcagccgccccctctgctgctcaccaagagatttgctgtggcttcctggataaataagaaatgtgtttaggccgggcgcagtggctcatgcctgtaatcccagcactctgggaagccgaggcgggcctatcacctgagatcatgagttcaagaccagcctggccaacatggtaaaacccccctctactcaaaaaaaaaaaaaaaaaaaaaaaattagccgggcatggtggtgtgcgcctgtgatcccagctacttgggagactgaagcaggagaatcgcttgaacccgggaggcagaggttgcagtgagccaagatcgcagccattgcactccagcctgggtgacagagcgagactgtctcaaaacaaaacaaaacaaaacaaaacaaaatgaaatgtgttcagcccttgcaccccagggactaactaagcagtctgtctttttccctgagaggaagactgggggtgctgcactctcaccttctgcagcccggggaggctaaggcattcacagagggagaagcagctctcctagagaaggggaaactgaggcccacattctatccaagactcatcttaaccactaggactttactgaggcaagcacttgggcggttgacgcctcccagaaagaggaagcagggcactgaggttggagctggcagaagagtcaccccctaggtggatggcgtggcctagcccatgtcccctccctgtgtaaggttaccaggttttgagaaggacacagagcctgtctcccggtcaccttcaccaagtctgccctgactccctctcagaagctcagaaagaggccactgggctcacatagaatgtccaggcctgaaatggaacaggagggacaagtgatggggtttggaaggaagggaagagagatagactcagacgactgtttgtctggagattaggagaggggaaggatggaggaagcctcagtggcttccaaggtcctctccacccactcccagttccagaaaggcaggccctgtggttacagttccccctggtcacccatggagcccgtggtagccaccctaccttttggtttctctgtggttgtcaggaccccctaccctgccattctctaccaagcagccagggggagcttttaaacttgtaactccatgtcactccccaactccaaattcttccatggctccctatagcccaagtaggatggcccctgccgatgaagcctcctcccactcttcccccagggccattccactccaaccacactaaacctcctccatgctacccctacccctacctccaagcctttacccctgctgttcttcttggggcacactctttttctcaaaaaaaaaattttttttttttgagacagagtctcactctgttgcccaggctagagtgcagtggtgtgatctcggctcaccacaacctctgcctcctgagttcaagcgattctcctgcctcagcctcctgagtagctgggattataggtgcctaccaccacacctggctaatttttgtatttttagtagagatggggtttcaccatgttggccaggctggtctggaactcctgacttcaggtgattcacctgcctaagcctaggaaagtgctgggattacaggcgtgagccaccacgcctggcctttcctcaaatctttgaatgactgtctccccatctttcagaaaggcaggccctgtggttacagttccccctggtcacccatggagcccgtggtagccaccctaccttatagaaagtgacctttctatttaaaggtcacttcctcagaggggactcccctgacccccagtctacaatagcagccatctccaagccttttctaatcacagaatctcgttttattatctgcacagcgcttgccactatgggaaactatcatgatatctttccttttctgtctggcttccacctagacagtcaatgcctaaggccagggagcaagtcagttatcagcccctacagggatgcctggcacaaataaaacactcagaaaacgtgtggaatgggcaaatgaatgaatgaatgaatgaaccaatgaacaaaggagaccctagtgggttcccaagggtggaaactcctaagctcagcccagacccaaacagcaacaaaggagcctggagacacctctggtccgcgggcagcgcccccatcgcccaccatcaaccaggcaaagcccagcgtgtctccatggagatggcagcaggacccgaccccgtgctggcccgcactctcggcctccttatctggtttaggaatgcgcggtatccacgctcgctcgcgcgggagccacgcctcctctcccccccgcccccgagaccgccacacgcgcggggcccccacgtctccaagcggcactggaaggattcctctccgtcccgccaggggtcccgcctcgagattctgggaagactgggggtgggggaccagatcgcagcagcagctgcaccgcgagttccgcgcctggccgtgtcgccccacgagggggactgtgggctcagcgcgtggggcccggagcatctgacaaggacagagacagaggagggggtggaaatccccgggtgagtcaacccgtgcctgagaagggggcgagttccgacgctccgcccggctcggggccacgcgaggtccgcgccacgcgcgccttcacccacgacccatccctgagccggagttgaaagaggaggcgtctgagccacgcagtcactttctctttccttacaaaacaaagccacgccccccgccgggggaccggaggaggcaaacaacttggggaaaccgaggcagaaagcccgacgtccgaccgccctccccgtgggtgccgccccttggcttggaggctccacggcgcgcacatccttttgccctcgctcagccggagtcagccaggaggggtgttgcccccccccaaacacactccccaagaccccggtccccgagcacggcgtcctgcctcccaaagactccagtcgaaagcgctcggattcagccttctccccggcgccaacttcctgccgctgagaaaggcggggagcacagtctgcgggttcgcggccgaggcagtgggggccgcccggattcttggagagggcgcactgtgaccacccgctccgtgcagcaggaacccaggcggcgcgtgcgcgccccagccccccgattggggcccctcagctcggatcccgagacctcaggggaccaggcccgccttttctgcctccttgtcgccacgcgcgctcacctggctaggccggcccggctcccggccctggccggaggggccttggcgtctgcgtccccagggcggccgcggctggggctggggttgccagccgggctcggctaagtcccggggctgggacgagggacagaggggggggcggagagccgccgcctctgccccccgctcgccccgccctcctctcctcccctttccggcggcggctgcaatgaattccagatgtgaccggccggctggccggggcgcacgcgggggccgacaggagctgcacggagggccctttgtccgccccccccacccgatctctcactctgcccctcccagcccccacccgtgagaaccggccggcgcgaaacgtcacgcagcctggtgacgtcacagtactcctggccaggtggcctcaacctgaaacaactgtcttcaaccccaggttacctctgggcttacccctgggaccctggacttggaagaaaacacgaggtcacatttattgactcaacaaagagccttggaagtacctactaggtgtcaacgcagcaaataggcattaagtgcctactgtgtgtccacccaacaaataaattcctactaagtgcgatgtcctgtcccaaagacaaaattgatctctttttttttttctttttttgagacatggtcttgctctgtcatccaggccagagtgtggtggctcaatcatagctcacgggagcctcagcctcctgcctcagcctccagagtagctgggactacaggtgcgccatcatgcctggctaattttttgcagttttttgtagagatggggtctcgctgtgttgcccaggctggtcttgaactgctgcattcaagcaatcctactgcctcagcctcccaaagtgctggaatgacaggcgtgagccactgtgcctgaccagtctctcccttgataggacctccagaattcaggtgctgccctgtttcccttgggggactggggacactccacactctttcctgcctctgtagatcactgtcccctctggcggggcccagtttgtgcctgccttccagcgtcgggcccagtcttctatccagatttccaattttcactaattcctgggcatttctgtgtgcctgcctgcggaaatgatggacactacaccttcatcgaatgatgtgtgtgtgtgtgtgtgtgtgtgtgtgtgtgtgtgtgtgtgtaaccagcagttcgacaacaggataggaaagcccctcattccagcaacaaaatttttttgtttgagacagagtcttcctttatctcccaggctggggtgcagtggtgccatctcagctcactgcaacctctgcctcccaggttcaagctattcctgtgcctcagcttcacaagtagctggaaatacaggcgcgtgccaccacgcctggctgatttttttgtatttttagtaaagacagggtttcaccatgttggccaggctggtctcgaactcgtgacctcaagtgatccgcctgcctcggcctccccaagtgctgggattacaaatgtaaaccacagcacctggcaacaaatattttttatgcacctactgggcacagcagtgaacaacaacaacagcaacaaaaaggaaaaactccttgaccagatggatttttttttttttttgagacagagtctagctctgtcgccaggctggaatgtagtggcactatctcggctcactgcaacctctgcctcccgggttcaagcgattcttctgcctcagcctcctgagtagctgggattacaggcatgcgccaccatgcccagctaatttttgtagttttagtagagatggaggtttcaccatgttggccaggatggtttcgatctcctgacctcatgatctgcccgccttggcctcccaaagtgctgggattacaggcatgaacaaccgtgcctggccaacccagtggatcttatgttcaggtgggaaatatggctttttatgagggtaccatttgtgaaaatgtagacattatatgttataaacataatctggccaggcacggtggctcacgactgtaatcccaacagtttgggaagccaaggtgggtggattgcttgaccctaggagttctagattagcctgggcaacatggtgtaactccatctctacaaaaaatataaaaattggctgggcatggtggctcacgcctgtaatcccagcactctaggactccaaggtgggtggatcacttgaggtcaggagttcgagaccagtctggccaatatggcaaaaccctttctttactaaaaatacaaaaaattagccgggcgtggtggcgggcgcctgtaatcccagctactcgggaggctgagttaggagaatcgcttgaacccggggaggcgggcgttgcagtgagccaacatggtgctattggacttcagcctgggcaacagagcaagactccgtctcaaaaaataaaataaaaataaagaggctgggtgcaatggctcacacctgtaaccccagcactttgggaggcaaaggcaggtggatcacctgaggtcaggagttcaagaccaggctggccaacatggcgaaccccatctgtactaaaagtacaaaaattagccgggaatggtagtgtgtgcctggagtcccagctactcgggaggctaaggcaggagaattgcttgaaccctggaggtagaggttccagtgagccgagatcatgccattgcactccagcctgggtgacacagcaatactccattttaaataaataaataaataaaactaaataaataaatggagtagtcttgtgtgtactgatgggaaatggtcttcaacatattaagttgaaaaagtacagtgtagaccagtatgcattgcatttctgggtgtatttataagaactatataaatacacacacatttgcctgtgacacacagtctgtctctgggagaaggcaccagaccctagtcacaacagttactcttagggagaggaaccagggggcagggaaacgaggtaagaagaaacagcttttcatggtataccctggagggctgtttgaaatcttttttttttttttttttttttttttgagacgaggtatctccatattggccaggctggtctcgaattcctgacctcaggtgatccgcctgcctcagcctcccaaagtgctgggattacaggcataagccactgcgcccagcctgctgtttgaaatctttagcttctattaccaattcaaaaaaatgtacaaagaggtcgaggcaaggggatcacctgaattcagcagttcgagactagcctgaccaatatggtgaaaccccatctctattaaaaataccaaaattattgggaggctgaggcaggcagatcacgaggtcaggagttcaagaccagtctggccaacatggtgaaacccggtgtctattaaaaatacaaaaattagctgggcacagtggtgcacacctgtagtcccaactacttgggaggctgaggcagtagaatcacttgaacccaggaggcggaggttgcactgagccgagatcccgccactgcattccagcctgggcaacagagtgagactgcatctcaaaaaaacaaaaaaacaaacaaaaaaaaacacaaaaaactagccaggcgtggtagcaggtgcctgtagtcacagccactctggaggctggggcaggagaactgcttgaacccgggaggtggaggttgcagtgagccaagatcgtgccactgcactccagcctaggcgacagagtgaaactccatctcaaaaaatatattaaaaattttaaaaaattggtcatggatagtggctcatgtctgtaatcccagcactttgagaggccaaggtgggaagaccagttgtgcccaggagcttgagatcagcctgcgcaatatagtgagacttcgtctctacaaaagaaaaaacaaaaaattaaacattagccaagcatggttgtgtgtgcctgtagttccagctactcatgaggctggggtgggaggatcacttgagcctgagaggtggaggttgaagttagctgaaatcacactgctgcactccagcctagttgacagagcaagacactgtctggaaaaaaaaaaaatcaacaggccaagcacgataactcacaactgtaatcctagcactttgggaggcagaggcgggaggattgcttgaggccaggaatctgagaccagcccaggcaatatagtaagagcccatctcaaaaaaaaaaaaaaaatcaacacgttaatgctacatataggcatgcaatatatgtgtgtatgtaacacaacatgtaatgctctgtgctaagcctggtgatgcctaattggttgctgccatccaaagctgacagtctgatggaggagacagagaagaaaccagacaattatttttatttatttatttatttatttatttattttgagacagagtctcgctctgtcgccaaggctggagtgcactggcaagatctcggctcgctgcaacctccacctcccaggttcaagcaattctcctgcctcagcctcccaagtatctgggattacaggcgcacaccaccacacccggctaatttttgtattttcagtagagatggggtttcaccatgttggccaggctggtcttgaactcctgacttcaggcgatccacctgcctcagcctcccaaagtgctgggattataggcgtgagccaccgtgcccggccgaaaccagacaattctaacacagggtgatggggctttgaaggggggatacaaagaaagtcagaaagtgactagtcaattctacactttgccccttttcctgagctcgatttcagggtctgctgggttctgggccagatcttggggcgcacttggaccttggcaaaacctcactgcctcttctaccaagtgagaagtgttgcctggacactctagaaaccaggtgtttaatccgcagaggaggaagcacgaagaaaattaggttttctcctcgtctgagagctatcagagcggaaatctcagtcttgtgtggggacctgaaggctggggaggaagtgaccgccctcatatgcctgggctggctcagcaatttgcagtctctcctgggacctggggggttggggcagaggggtgatgtcaaggctgcagacatatgtggccgtctgccaggggaaccgtggctcccagacaaaggtgatgtccccggggacacacagacacaccgacatgcaacttccgcctccctcccacttctgaggcaacacaatgtcttcgccaggtcagccaagggagcgctacagaggactggaaaacgctggaggcctggacttcctgatggtcttggtgggggtcaggaggagagcttggcctaccccggtggcggggggcggggggctgagtgagagaacagtggaggaggaaggaaacagggcccttttcttggagaactcccagcaggggaaatagaggagaaggaagaggcttgaactagcttccactaattatagggtcagtgacaataatggctaacactcacagccaccgactgtgtgctagatgtggcgctgtgagtcctcacaacccgaggaagtgggtattatgataatcatcatcttttttttttttttttttgagatggagtctcgctctgtcactcaggctggagggcagtggcgcgatctcagctcactgcaacctccgccttccaggttcaagggattcccctgcctcagcctcccgagtagctgggattacaggcgcccgccaccacacctgggtaattttttgtatttttagtagaaacggggtttcactgtgttagccaggctggtctagaactcctgacctaagctgatctgcccacctcggcctcccaaagtgctgggattacaggcgtgagccaccgtgcctggccttttttttttttttttttttttgagatggagtctcgttctgtctcccaggctggagtggcagtggcatgatcttggctcactgcaacctccgcctcctgggttcaagcgattctcctgcctcagcctcccaagtagctgggattataggcccgcgccaccatgcctggctaatctttatatttttagtggagacagggcttcaccatgttggccaggctgatctcaaactcctgacctgaagtaatccattccatgtaccttggtcttggcctcccaaagtggctcacactcttacaggtgtgagccactgtgcccggccaatcccattttaaagaagaggaaaattgaccaggcgcggtggctcacgcctgtaatcccagcactttgggagatcaaggtaggcggatcacctgagatcaggagttagagaccagtctggccgacatggcgaaaccccatctctactaaaaagataaaaattagccaggtatggtgatgcgcacctgtaaccccagctactcgagaggctgaggcacaagaattgcttgcacccgggaggcggaggttgcagtgagccaagatcatgccattgcactccagcctaggtgacagagcgagactctatctcaaaaaaaaaaaaaaaaaaaaaaagaaggaggaaaattgaggcatacaggagaggtgagattcgaactagagccatccggctcctctcaatccagcagccctggctgtctgtcttcttattcattcggagtctccaccccattcctgtgccaccacccccatctctgccccagcaggtaggaacagacaggcagtggttaccagccaggactacattggtcaacagtgagatgtggaatgttctccataatccaggagaagggacgccctctgacccccattcctaccttcaccccggatattgtgaactcccccaaatccaggaggcccaggcccttcacaccagatcctgtggttgcccaccatggccctgaaatccatgagacgcaggcctgttctccatcctccctgggcctccactgtccccccacccccctggctctcgtctctggcaggaggaactgcctgggaagtgtctgagatggatcccaactttctcatcatcgccccagcgctgggggaaggggccccaggctacagagaagcttcccagatgctgatcttggcaggcatcagggaactgcggcagcctcatctcctccatgggctcagggcccactttcagcttcagtgacggggtggggaggctcccactggaggccagcctctgccacatctgcaccagaagcagtcttggcccttcgagctggggaaggggtgggctctcttcccgccaaaagcaggatgaacaattaggggaaaggggaacctcaaaaaggctaacttctcagcaagcccctcccaccccagcatgctcatgacagctgacatgtgtataacgtgccagttactgccctaagtgttttacaaatattgactcactctcaatagctcacagcagctccctcagctagagaaaggagagataaactgcagtccatcctcacaatggaagaccatgcctgtaatctcagcactttgggaggctgaggcgggcggatcgcctgaggtcaggagttcgagactagcctggacaacatggcgaaaccccatctctactaaaaacgaaaaaattagctgagtttggtggtacgcacctgtaatcccagctactcaggaggctgaggcaggagaattgcttgaacccaggaggtggaggttgcagtgagccgagattgcaccattgcactccagactaggtgacaagaacaaatgaaactccatctcaaaaaaaaaaaaaatcaaaaagaaggaattggtgatacctagccacatggagaactctcaaatgtattaggatgagggaaagaagttcaacgcaaaggttgcatattgtatgactctatttctataatgttctaggagaaaaaaaactatagggacggtgaaatattgggacaggagaggttgactgcaaaagggcacggtgggaccgggtacagtggctcacccctgtaatcccagcactttcagaggctgaggtgagagaattgctggaacccaggagttcgacaccatcctgagcgacagagcgagacccagtctctacaaaaaaaaaaaaaaaaaaatgagtcaggtacagtggcacgtgcctgtactagctattccggaggctgaggcaggaggattgcctgagcccagcagtttgacaccactgtcacctatgatcgcaccactgcactccagcctgagcaacagagtaagaccaatgtcttaaaaaaaaaaaaaaagttggggggcatggggggaatttttttttttttggcgatggaaccattctgcatcttgattgtggttttggttacgtgactatatatgtttcttgaaatgtgaacaactgtatgcaaaaaagggaagattttctttcttttgagacagagtcttgctctgtcgcccaggctagtatgcagtggcgcgatccactgcaacctctgcctcctgggttcaagcgattctcctgcctcaccttacaggtgtccaccaccacgcctggctaatttttgtatttttagtagagatggggtgttaccatcttggccaggctggtctcgaactcctgaccttgtgattcacccgcctcggcctcctaaagtgctgggattacaggcgtgagccaccacgcccggccaggaagatttttattgtatctaaattgtgcaaaaaaagcaatacttttgtttaaaaaattctcacagcagccttattatttgtgtgtttgtttatttgttttcttgatcttagccaaaaggccgagaagcgatttatttatttttattttttatctttttttttttttttttcgagacggaatctggctctgtcgcccaggctggagtgcagtggcgcaatcttggctcactgcaagctccgcctcccaggttcacgccattctcctacctcagcctcccgagtagctgggactacaggcacccgccagtacgccgggctaattttttgtatttttagtagagacggggtttcaccgtgttagccaggatggtcttgatctcctgacctcgtgatccacccgcctcggcctcccaaagtgctgggataacaggcgtgagccaccgtgcccggcctagtttttatctttttagagataaggtcttgctctgtcacccaggctggagtgcagtggcgcaatcatagctcactgtagtctcaagctggtgagttcaagcaatctgcctacttcagcctacccagtagctgggactacaggcccaagacaccaagcccagctaacttttacattttttgtagagggttaggttggtctcactatgttgcccaggctggacctgaactcctgggctcaagcgatcctcccaccttggtctcccaagggcactgagattacaagagtgaaccactctgcctggcctccggacagtagctttacatcagtgagggtctaatcaggaaaacagaagtatctccaatagaggggatttaatatatgggtcaatttaatacgtagataaaaaatcaaacgatggccaggcgcggtgtctcatgcctgtaatcccagcactttgggaggctaaggtggacaaatcacgaggtcaggagttcgagaccagcctggccaacatggtgaaacccggtctctactaaaaatacaaaaaattagctgggcatagtggcaggagcctgtaatcccagctacttgggaggctgaggcaggagaatcgcttgaacccgggaggcggaggttgcagtgagcggagattgcaccactgcactccagcctgggtgaaagagtaagactttgtctaaaacaaaacaaaacaaaacaaaatggatggagagattattttaaaattagcataggccgggcacagtggctcatgcctgtaatcccagcactttggaaggccgaggcgggcggatcacctgaggtcgggaattcgagaccaggctgaccaacatggagaaaccgtgtctctactaaaaatacaaaattagcctgatgtggctgggcgcagtggctcatgcctgtaatcccagcactctgggaggccaaggcaggtggatcatgaggtcaggagatcgagaccatcctggctaacacggtgaaacccgtcactactaaaaatacaaagaattagccgggcgtggtggcaggcacctgtagtcccagctactcggaaggctgaggcaggagaatggcgtgaacccgggaggcggagcttgcagtgagccgagatcacaccactgcactccagcctgggcgacagagtgagactccgtctcaaaaaaaaaaaaaaaaaaaaagtagccgggcatgctggcacatgcctgtgatcccagctactagggaggctgaggcaggagaatcgcttgaacccaggaggcggaggctgcggtgagccgagatcgcaccattgcactctagcctgggcaataagagcgaaactccatctcaaaaaaaaaaaaaaaaattagcataaaccaagcatggtggtgtaggcctgtagtcccagccactcgggaggctgaggcaggaggatcacttgagcccaggagttggactccggcctgggcaacatagccaaacctcatctcttaaaaaatataataaaaataaaggatatggcagaccatgtaaaaaatttaaatagaaattaccatataggaagatgatatctaatgggaggtgctaccagaggcatatggggagaaatatcttgggctgggtgcagtggttcatgactgtaatcccagcactttgagaggccaaggtgggaggatcacttgaagccaggggtttgagaccagcctgggtaatataggagacccccatctctattttaaaaatctttaaaaaaaaaatccatgtatggttgcacgcacctgtggttccagctactcaggaggttgaggcagaaggatcacgtcagcccaggaggtcgaggctgcagtgagctatgattgtgccactgcactacagcctgggtgacagagtaagaccctatccctagaaaaaaagcaaaaagaggccgggtgcggtgactcacgcttgtaatcccagcactttgggcggctgaggcaggtgaatcacctgaggtcaggagttcaagaccagtctgaccaacatggtgaaaccccgtctctactaaaaataccaaattagccgggcatggtggtgcgtgcctgtaatcccagctacttgggaggctgaggcgggagaatcacttgaacccaggaggtggaggttgcagtgagctgagatcgtgccattgcactccagcctgggcgacaagagcgaaactccgtctcaaaaaagaaaagaagagaaaagaaatatcttggcttctcctaccttcctctcggaaaatctgcccccagtgcctcccattggctaaatgtggccagaagccagttggcaggggagatgtcccgtgcagaggtcagccccgagccatgcagggagaacagcacagggactagatgatgccagggctcgcaggcttaagccctgcaagaaccatgtgggtaggggcaactatacccccattttacagaggaggaaactgaggcctggagagccaatgtgacatgcccagggtctcaggccctcaaggaggttggactctctggttctcgccaacacctgcctggagggctagttctgtggctttttttctacccttcacgcctgtcctggttgctcagggaactgtagggaatgaaaatatccatgcaaatcagccccactgcggggaggccctccgtgggaggctttgccccctcacggagcttggcagttacacacaagctgagctgaaaacaaacaaacagcagatgtttggacagttgatgggggaggggcgctttaggcagctctccctagtataggagaccacccctcaccccccaccaacagatctgtgtcatccatccatgccctgtactttttttttttttttttttgagatggagtcttgctctgtcacccaggctgaagtgcagtggcgcaatcttggctcactgcaacctctgcctcccgggctcaagcaattctcgtcactcagcctcctgagtagctggaattacaggcgcccgccaccatgccgggctaatttttgtatttttagtagagacggggtttcatcatgttggtcaggttggtctcaaactcctgaccttaaatgatccaccctcctcggcttcccaaagtgctgattacaggcgtgagccattacacccagccaatcccattttaaagatgaagaaaattgactgggtgaggtggctcaagcctgtaatccctacattttgggaggctgagttgggcggatcactttagccaccgacctcatgctctgtaccttctttttggggggctgccccccagtattgcaggcctgacccctggcctttgtgagaacccttgttcagtaatggaggaaaagctgaggccagatgttgaggggccttcccgcatctgatatgtgccccctaaattggtgtgatacccacagccagcaaagaccctctctggattacagggttgatgctggtcccacactaccaaggacagaggtcacctgcaattgagcctttgatccacaggagagggctggttgcattggcctttgacctctccccaggcttggctcaaaatggtcaaactttgagccttttggtgtgaaggtcccctggtcgttactgcccttttattaagactcataactgggggccggacgcggtggctcacgcttgtaatcccagcactttgggaggccaaggcgggcagatcacttgaggccaggtgtttgagaccagcctggacaacatggtgaaaccgtgtctctactaaaaatacaaaaaggcagggtgcagtggctcacgcctgtaatctcagcactttgggaggctgaggcaggcggatcacgaggtcaagagatcgataccatcctggccaacatggtgaaacctcgtctctactaaaaatacgaaaattagctgggcgtggtggcgtgtgtctgtagtcccagctgctcaggagactgaggtaggagaatcacttgaacccaggaggcggaggttgcagtgagcagagatcatgccattgcactccagcctggacaacaagagtgaaactccgtctcaaaaaaaaaaaaaaagactcataatcaatatgccagttggggaatgctgtgtaaactggggtagggaccaggtgcagtggctcatgcctgtaattccagcactttgggaagccgaggctggaggacagcttgaggccaggaatttgagaccagcctggccagcacagtgggtctctgtctctaccaaaaataaaacaagtcagcccagtgtggtggcatgtgcctgtagtcccagctactcaggaggctgagtgtgaggatggcttgagcccaggaggtaaagcttgcaatgacctatgatcctgccactgcactccagcctgggcgacagacggagactctgcctctaaaagataaaaaataaaagctggagtaggaagggaaggataagtttagatgcattgtcacctaagaaggtggcatttcagtaaagagccaaaggagatgaaagagtgagacatacagatattcaggggaggctgggcatggtgtctgaagcttgtaatcccagaattttgagaggctaaagtggtgaatcactagaggccaggagttggagaccagcctgggcagcatagtgagactccatcatgttttgttttgttttgttttgttttgttctgttttatttgagacagtgtctcactgtcacccaggctggaatgcagtggcataatcacagctcactacaacctccgcctcccaggttcaaacaattctcctgcctcagcctcccaagtagctgggattataggcgcctgccaccacacctggctaatttttgtatttttagagagacaaggtttcaccacgttggccaggctggcctcgaactcctgacctcaagtcatctgcccacctcggcctctctaagtgctgggattacaggtgtgagccaccacgcctggccctcagcatgttttttaaaagaataaaataataaaagaaacaaaaatagatattaacggggaaatggaatgtgattggtgggttctgggttctggtgaggaggccagggcggctaaagccatggaggaaggggaacaggagaatggaaggttagggcaggtcctgcggggacttgagggttgcatgaggactttggttttagtgctaagtgaaatgaaggcactgagggttctaagcagaagagggaagtgacctgactcagatgtttacagcctacctctaggggatgggtaacagatgatgaggagtgagggtggaaggaagaattcattctcaacacagccccgtaggggagggtttgtgtgtatttcacttacagattaggaggccacagctcccacttgcccaaggccatccagccaattagtggcagtgcctggattcaaaccagtgttactgaatgaataatcatgtatgggcaccttacgtgcccagtgacctcaggtggacagagatttgagacccagggacatagggagaaagtcctctgttgttagcaatacccctgcaacaggatgaacaaaggaattcactcaggaaacatttattagctgggtgtggtggtgcatgcctgtggtcccagctactcgggaggctgaggcaggaggattacttgagcccgggagttgcaggctgcagtgaactatgatcatgccactgcactccagcctaagtgacagagtgagactctgtctctaaaaagaaaaacaaaagaactaaagaaacatttattgagcatgtactgtggtccagacactatgctgagtgctgaagctacagcaggtaataggatagaggaaaattccagccttgggtgagtttacattctaatgggagaggcagacaaaaagcatttttagccaggtgcagtggctcacgcctgtaatcccagcactttgggaggccgaggtgggcagatcacaaggtcaggagtttgagaccagcctggccaacatggtgaaaccccatctctattcaaaatacaaaaaaattagccgagtgtggtggcaggcgcctgtaatcccagctacttgggaggctaaggcaggagaatcgcttgaacctgggagatggaggttgcagtaagctgagactgtgccattgcactctagcctgggcaacaagagcaaaactctgtctcaaaaaaaaaaaaaaaagaagaagaagaagataaccattaggccagatgtggtggctaacatctgtaatcccagcactttgggaggctaaggcaggagaactgctggagccgaggagtctaagactagcctgggcaatgtggtgagacctcgtgtctacaaatatatatatatttttaaatagccaggtgtggtagcacacacgtgtagtcccagctactcaaaagaccaaggtgggaggatcacttgagccccagagacagaggttgcagtgaaccaagatctcgacattgcactccagcctgggtggcagagtggaacactgtctcaaaaaaaagaagataaatattaatatagggcaagagaagagggtcagaaaggtcagaggtgaagatttgcttttttatttttttgagacaaagtctcgatctgtcacctgggctggagtgcagtggcgcaatctcagctcactgcaacctccgcctcccgggttcaagtgatcctcccatcttagcctcctgagaagctgggactacagtcgcacaccagcacagaggtttcagtgagctgaaatcacaccactgcactccagcctgggtgacagagtgagaccctgtctcaaacaacaacaacaaaaacaaaggaagcatgcagtgggtagtccgaaaggttcagccacctctgccccctgtcagtctttcctcactcctggcctctgcgactgctgttctctcaacctgaaacagactttctcctctggacaaagtcctcaagccttagctctcaggctacagcttcataagaccaccccaagaccctgcccccgtggttgggaattcctcctgtggacgcccacagaccctgtagactcccctcctgaactctgatccttcaggcctctgcattggactgtgaatatttcaaaagtgtttgctggatttactggtgtaccagtggtgcacagtaggtgcctaataaatcactaagaaactaagccaggcggcctagtgtggtggctcacgcctgtaatcccagcactttgggaggctgaggcaggcggatcatttgaggtcaggagttcgagaccagcctggccaatatggcaaaaccccatctctactaaaaatacaaaaattagctgggcgtggtggtgtctgcctgtaatcccagctactcaggaggttgaggcaggagaattacttgaacccaggaggtggaggaggttacagtgagccgggatcgcaccactgcattctagcctgggtgacagaatgagactgtgtctcaaaaaaaaaaaaaaaaaacaaaaggcacagggcatggatggatgatacagatctgttgtgggggatgaggggtggaatcacaaggtcaggagtttgagaccatcctggctaacatggtgaaaccgtctctactaaaaatacaaaaattagccaggcgtggtggcgggcacctgtagtcccagctactcaggaggctgaggtgggagaatggcgtgaacctgggaggcggagcttgcagtgagccaagatcacgccactgcactccagcctgggcgacagagcgagactccgtctcaaaaaaaaaaaaaaaaaaaaaaaagccaggcgaggtgactcacacccataatcgcagcactttgggaggccaaggcgggcagatcgcttgagcccagaagtttgagatctgcctgggcaacacggcgagaccctgtctctatgaaacaagaaaaaagaaagaaacgaaatactgttccatcatttgccacataaaatctaaactctctggtgcagaacagacttgcaaatctgcctgtaaaatcatacaccggattttggagtagacacacaggaggctgattgtagtggtggcttctgggagaagaactggggggtagggggcacagataagagtagacagaattttcactctagtaatctttgtaatttttgaaattctctctaccaggtgtatgaatgaccaatgaaaatatacaataggccaggcgcagtggctcacgcctataatcccagcactttgggaggctgaggcgggtggatcacatgaggtcaggagtccgaggccagcctgaccaacatggtgaaaccttgtctctacgaaaaatacaaacattagtcaggtagggagcatcacttgagaacaggagttcaagaccagcctggacaacaaagcaagacctctgcctctacaaaaaaaaaaaaaaaaaaaaaaaattgctgggcatggtggaacatgcctgtggcctcagctacttaggtggctgcagcagaggatcatctgaggccaggaattcaagactacagtgaactataatcgttacactgcactacagactggtaacagggtgagatcctgtctcaaaaacaacagcaacaaaataaacgattaaaagaccttttaaagttgcaaaatacatagagtcttaaacatgcatccacagttatttatttatttatttagaaacggagtttcactcttgttgcccaggctggagtgcaatggtgcggtatcagctcactgcaacctccgcctcccaagttaaaggaattctgcctcagccttccaagtagctggaattacaggcatgcgccaccatgctcggctaattttgtatttttagtaaagatggggttttggcatattggccaggatggtttcgaacccctgacctcaggtgatccacccgcctcggactcccaaagtgctaggattataggcatgagccaccacgcccggccgcattcagttattcttgcagggataaaatacacaatgaaatacactatactttttgttttctttctttcttttttttttttttttttgagacagagtctcactcgtcgcatgggctggagtgcggtgcgggatctcggctcactgcaacctctgcctcctgggttgaagcgattctcctgcgtcagcctcccgagtagctgggattacaggtgcccgccactacgcccagctaatttttttgtatttttagtagagataaggtttcaccatgttggccaggctggtctcgaactcctgactcgtgattcgcccaccttggcctcccaaagtgctgggattacaggcgtgagccaccgcacccggccacatttttttttttttttttttgagacaggatcttagtctgtcacccaggctggagtacagtggcatgaacatggctcactgcagcctcaatctcttgggttcaggtgatccttctgccttagcctccccattagctgggaccacaggcatataccatcacacctagctaatttttaaatttttggtagaggccaggcgcggtggctcacgcctgtaatcccagcactttgggaggccgagtcgggtggatcacctgaggtcgggagttcgagaccagcctggccaaaatggtgaaaccctgtctctactaaaaataaaaaataaaaataaaaattagctgggcgtagtggcgggcgcctgtaatcccagctactcgggaggctgaggcaggagaatcgcttgaacccaggaggcagaggttgcagtgagccaagatcgcgctactgcactccagcctgggcaacagagtgagattctgtctcaaaaaaaaaataataataatgctatttattgactttacaccttgtaccaggcatgggaagctttgcctccattacgtcactgaatctcataacctccttttccagcagaggaaaatgaggttggttcacagaccacgttgtcagctgtgctctgtccagaacgcactggcctccaagtagacagccctggactggtagggaagccggctatgatccggtggcgccccctggaggtctatcgggaacatggtaaagaacctaaaaatgggtgggccacagtagctcatgcctgtaatcccagcactttgggggaccaatgcgggagaattgcttgagcccaggagttcaagaccagcctgggcaacattgggagacccaccccccgccatctctacaaaaaaaaaattaggccgggcgcggtggctcaggcctgtaatcccagcactttgggaggccgaggcgggtggatcacctgaggtcaggagttcaagaccagcctggccaacgtggtgccacactgtctctaataaaaacacgaaaattagggccgggctcggtggctcacgcctgtaatcccagcactttgggaagccgaggcgggcggatcacgaggtcaggagattgagaccatcctggctaacacggtgaaaccccctctctactaaaaatacaaaaagttagccaggtgtggtggcgggcgcctgtagtcccagctactcggtaagctgaggcagggaatcgcttgaacccgggaggccgagatgtgcgatctcacaccactgcactccggcctgggcgacagagcgatactccatctcaaaatacaaatacaaaataaaaaaatacaatacaaaaatgagccgggcttgcgtacctgtagaccagctactcaggagacagaggcaggagaatcccttgagctctggaggtcgaggctgcagtaagccatgatcttgcccattgcactccagcctgggcgacagaggaagaccttgtctctaaaaaccaaaacaaagaaactaaaaataagcattcggatttgttagggggcgacaagggaggcactccaggatctgtggactccccactttgttctgtccttggagagccctggaaggtctgagaggggacgggacctggtttaagggggtaggggagaggaccctggtctagggggtaagggacacaaatacctaatctgaggggtttcggggggacatggccctgccctggggaatctaaactgggaggcatggtctggcaggcccaatcctgaaggctttctgagggcaataaggccctgcctttaaacaaatgaaaaaacgccaggcacggtggctcacgcctgtaatcccagcactttggaaggctgaggcgggaggatcacgaggtcaggagatcgagaccatcctggctaacgcggtgatacccgtctctactaaaaatacaaaaaattagccaggcgtggtggcgggcgcctgcagtcccagctactcgggaggctgaggcaggagaatggcgtgaacccaggaggcggagcttgcagtgagccgagatcgcgccactgcactccagcctgggcaacagagcaagactccgtctcaaaaaaaacaaaaacaaaaacaaaaacaaaaacaaaaaaacaaataaaaaaacaaaaccacataactggataaagaaaaaaccatctccgacagccttggaggcgggatgaaggcgtggcccggtgggcgtgaccaacagcaaaagtttaagcgttattggctgtattccttagttgctcactccagaactgcccacttatgggcgggggtcactccttcaggcttaacagtcattggctgaattgggccagagaggtctcattggctgaattcctgcaccggctcgtcggaggcgggacccaaagtaggctaggcctacggaagctgggtcttcttgctgtgaggtcgcgttccccagtgttacggagggtccttgaggcaggagtgaaaattgggtctgggggttagtcctggggtggaggtctgggcacgccgggtcggaccccctccatcttcggttttgcacaccccgctttccagcgcggagtcgcggcgggtagggcggcgtcgcgtgcgtgacgtcatccagcggcgcctcgcgaggctccagtggccttgacctcccgcggcgtgggaggctgcgcggcgatgctgcagttcgtccgggccggggcgcgggcctggcttcggcctaccggcagccaggtgaggccaggggctggaggcgtggtcgaaggatgaaatttgggggtgtccaggggtcgtctctcactttcgcccaacccttgcagggcctgagttccctggcggaagaggcagcgcgtgcgaccgagaacccggagcaggtggcgagcgagggtaaggcaaccggggtggctccaggaggggcggcgacagagaggtctgacccttgaccctaacctctgacccccgcaatcgctccaggtctcccggagcccgtgctgcgcaaagtcgagctcccggtacccactcatcgacgcccagtgcaggcctgggtcgagtccttgcggggcttcgagcaggagcgcgtgggcctggccgacctgcaccccgatgttttcgccaccgcgcccaggtgagcgagggctgtaatggtgaactgagtggcagagggatgaagagcgggatttcaggagtcacgatgactttgggcttgtacccttgggaaagtgctgtatttctacagcctccgtttctccacctgtcaaaggggaatgatgacagtttcccctgctgtagcgctgtgtgagattgaagcctgagaggtgacatcatctaagggttagggagacagaattctggagcccgactgattaggttcaaatcctgccttcccctcttgtccctcagtgtccctattttgtcagcggtcgggaggttgctgtgatgaataaatgacttaattctggcacataataagttctatagaaatgttgataatctttgttaactggtttttgcaaataagagcactaaaaagactaaaccattcctcggtgcctggaagaggctgtttgcattttagttaccctgctgttcataacatctctaagaaaatgtaggggccaccctgggcgcagtggctcacgcctgtaatcccagcactttgggaggccaaggcgggcggatcacgaggtcaggagatcgagaccatcctggctaacatggtgaaaccccgtctctactaaaaatacaaaaaaaaattagccgggcgtggtggcgggcgtctgtagtcccaggtactctggaggctgaggcaagagaatggcgtgaacccgggaggcggagcttgcagtgagccgagatcgcgccactgcactccatcctgggcaacactctgtctcaaaaaaaaaaaaaaaaaagaaagaaaagaaaatgtaggggccagttactgtggctcacatctgtaatcccagcacattgggaggccgaggtgggcggatcacttgaaaccaggagttgcagaccagcctggccaacatgatgaaaccccgtctctaccaaaaatacaaaaattagccggacgtcttagtgcaagcctgtagtcccagctactcaggaggctgaggcatgagaatcgcttgcacctggggagatggaggttgcagtgagccgtgattatactactgcactccagcctgggcgacagagacagactccatctcaaaaaaaaaaacaggtgaaattgatttcaataatgtatttaacctgtatttaaaactatgtcgaaatcacattgtagcatggggcactggccatgtttcagatgttgagtatgtgactgtatggaatggtatagaactagagaggaaaaccagtccctgaagaaggtggcaataagtgaagtgtaatagcaggaaaaaagtaatggtaggaaaaacaaggaagaaggggtggctttttttttctgagatgaagtttcgctcttgtcgcccaggctggagtgcaatggcatgctctcagctcacttcaacctccgcctcctgggttctactaattctcatgcctcagcctcccgagtagccagaatgacagacatgtaccaccgtgcccagctaatctttgtatattttggagagacatcactttgccatgttgcccaggctggtcttactccttgcctcaagtgatccacctgccttggcctcccaaagtgccaggattccaggcatgagccactgcacctggtcagggtggctctttctttagaaggtacctttcagcagttattggagctgctacctgtaggctgagaaagaaccatccaggagaagagtgtttcaggcagagggaacagcaagtgccaaggccctgaggcagaatttcaagatggggtcagtgaggggcagaggcaaatcgcccagggccctggaggcagaagggagaatcctgggttttcctatagtggggtgggagcgtttgaagcagagttgggcttctcatgtgtccttcctccccgcaggctggacatactgcaccaggttgctatgtggcagaagaacttcaagagaattgtgagtgcctaaatggagcaaggtggtgggaaggagcttcctggggaggttggggataggacccagaggaagcccatcgctgggttttctctggactgctcggctggggcctcatctgtctcctgaactattcaccgatgggtccatttttggttctcttttttttgtttgtttttgagatggagatggagtctcactctgtcacccaggctggagtgcagtggcgcaatcttggttcactgcaacctccgcttcctgggttcaagcgattctcctgcctctgcctcctgagtagctgggattacaggtgtgcaccaccatgcaggctaatttttgtatttttagtagagatggagtttcaccatgttggtcaggctggtctcaaactcctgacctcaaggaacctacctgccttggcctcccaaagtgctgggattacaggcgtgagccaccgtgcccagctcattttcagttgttttctgatcactcactgatgtgggcattgtggtgggtgagaggatatagcagggaccacgaggacaaaacaggcaaggtccggctgtgtgcaagtggctcaggcctgtaatcccagcactggaagctgaggtgggtgggttgcttggggccaggaaagaccagcctgggaaacagcaagacccagtctctaccccttcccccacaaccccaagaaaaagatgggcaaagtccctattctaatgaaggtcacagtgtcatgggaggagaagtgaaggtgagtcagatggtcatacgtaatgtgtaattatgagcatgtcccagagaatgggacgttcaaccttgggtctactgtagaagctaaccagatcaaggaggcagtggggctagtgtggagataacaggaacagggtgtgcaaaggccctgtggcagggaccacaaggaagccagtgttgccacagaggccagtgggagcagtggggaggagtctgggttttgtgccaagaacattgaagaatccattaccagtcagggtcttatccatccaccccagaggtctggccagtcctccccctgctcacaccttccctggctccccatcaccctaggaataaagtcatcagtctgctattctgagttcttcctgatttccttgccctgctcctctttcctgattctccctgtctgtgtcatttcccatggccctccctccttgtggctacaaccacattaaaattgttcaaaaaataggccggcacggtggctcacacctgtaatctcagcactttgggaggccaaggcaggtggatcacttgaggccaggagttccaaaccagcctagtcaacgtggcaaaaccccatctctactgaaaatacaaaaaattagctggggccaggtgcggtggctcacacctgtaatcccagtactttgggaggccgaggcggatggatcacgaggtcgggagatcgagaccagcctgaccaatatggtgaaaccccatctctactaaaaatacaaatattagttgggtgtggcagcgggcgcctgtagtcccagctactctggaggctgagacaggagaattgcttgaacctgggaggcggaggttgcagtgagccgagatcgcgccactgcactccagcgtgggcgacagagcgagactccatctcaaaaaaaaaaattagccgggcatggtgacaggcacccgtaatctcagctactagggaggctgaggcaggagaatcgcttgaatctaggaatcagaggttgcagtgagccaaggtcacaccacttgcactccacagcctgggtgacagagtgagactgcctcaaaaaaaaaaatcaatagttcagaaaataccgagcaccccctgcgtgcccggtggcagggcccctgcctttgtgaggctggcatggggcaggagctgtgacttctttaccctccccctcgctccccaagtactctgtgcttggccagagagagcccgtcatcatggtgcctcctgtctgacttccccgtggcaggactgatctgcccggctccctgacacctgcctcgtggacctgacccccctcctctttgtgcctccagagctatgccaagaccaagacgagagccgaggtgcggggcggtggccggaagccttggccgcagaaaggcactgggcgggcccggcatggcagcatccgctctccgctctggcgaggaggtaacaggacagggtggagggggcggggaggggtgggggggccagggaagggcctgggtgtttactcacacacagctgcgcacatctggcatggtattatgtcagccctgttccctccacctcatggaaccacctgggctggtgacatcggaactgaggcccttggacctcactacccatataaggggacagagatctgggagccatccactcctccctctcgcatgccctgtctcttcagcctgtggccacagcccctcttgaccccacctcctgtcaccctctcctgacccacacttcccacagcacccagagagctcttctaaatcgtggaacctgaactccggacctcggcctttgtgtggaacctgaactcctgaccttgtcattgtgggccctggtggctgcacacctttccccctcatcccctcctttccctctctgaccaggcagagatgactctctcttgttttttcggttgtgtttgtttttaactttttattttcttgaatgctaacaagatgactcagggtggtgccagccaccccatcacctgtttacctggccagctctcctcacctttcagggttctgggccacacctcctccaggaagccccccttgatctcctttccttccacatcccccggagctaccctgatttcttctacagctgagcctcttttctgccctgccggaatgtgaatggcatgagggcagggaccatgtctgttgtcttctctgctgcatttccaaggcccaggcgagggcagacaccaacacatggtgcttgcaggggtctccctgactgttgttgctcccagatcatactgcttgctccaccggagcatgtgcctgatgccttcctctcccgcttgacctgaaagttcgaacctcctgataacttcagcattaacagcgtgcttgagttaagttcacactctagccactctatggaatccacaccataactcatggtgtcctatggggcaggaactgtccgatctcaaggtggtttgttttttttattgtttgcttttgagacaagatctcgctctgttgcccaggctgtagtgcagtggtgcaatcatagctcactgcagccttgagctcctgggctcaagtgatcctccatcctcagcctcccaaaatgctggtgtgagccaccttcgccagccctgtctcagagtgtgacagctgggaaaactgaagcccagtgaagcaaagtcactggtcccatgttgtccctgatccagcctcccctgaggccccaccctctctgccttgttcctggcagcgccccctctctcgtcaccccatgccagccactgcagcagattgctgacctccaggctctgcagtggcccctacctgctcacatgcctctgtccccgcaggaggtgttgcccatggcccccggggccccacaagttactactacatgctgcccatgaaggtgcgggcgctgggtctcaaagtggcactgaccgtcaagctggcccaggtacagccatgggggggcccagacagctgctagaggtggggctgctctggacccagggttcaaaccatcctttccttccaccaggacgacctgcacatcatggactccctagagctgcccaccggagacccacagtacctgacagagctggcgcactaccgccgctggggggactccgtactcctcgtggacttgtgagggcacagggcagagcaggggcagggggccctgagctccgtactctgagggttcaacccccactccctggcctctcttacagaacacacgaggagatgccacagagcatcgtggaggccacctctaggcttaagaccttcaacttgatcccggctgttggtgagcaaagagcccaggcccctagagtgcgcatgtgcaggctccgctgttagaatcacagcggttcaaatccggcatctggtcgctgagtggcctcaggcagtgaccacgctcccggacccaaccttcagcttgcccaaagcaataatctttcctaaagaagtgcttggctggggatggtggctcacgcttgtaatcccagtactttgggaggccaaggcagtctgggcaatatagtgaggctcccatctgtactaaaaataaaaaagttaggcgtggcgatgtgcacctgtagtcccagctactcgggggctgagccaggcggatagcttgagctcagggggccaaggctgcagtgagtcatgatcgcaccactgcacccaaacctggggagagagctagactcttgtctcaaaaaaaaaaaaaaaaaaaaaaaaaaagctccaaagtcacctctgtcaaagccacagtctgttccttccacagccacaagatggcgacatgagcctaagtcaagtcctgtccctcaacccacgcccctcgctggcttccccacctctctcaggatgaaagcccaagtcatcagggtggcacgtcaggccctgcacgatgtgccccgtcacctccctgccctcccgtcatttgccctgggtctcccccaccagaatgggagccaggagtcccagccaggcacaggaccgagcctggctctcggtcagcaggtgatgagctgggagcagctccttggccagaggcttacaggcaacaagcggccaggcagggtctggccccgggctgctgggctcacaaagtcacactagaccacagtgacgatctctgtaagcacaaagggactccgatgtgggtggggtgaggagagaggcagccccggcctgaccggccccccgccccgcccccaccccgcccccaggcctaaatgtgcacagcatgctcaagcaccagacgctggtcctgacgctgcccaccgtcgccttcctggaggacaagctgctctggcaggactcacgttacagacccctctaccccttcagcctgccctacagcgacttcccccgacccctaccccacgctacccagggcccagcggccaccccgtaccactgttgatgtgaagcacctcttctgagccaggccgagcccctggccgacttgggagcctcaggcccacgcccacccttcgaggaaggtgtcacctggaccccttcattccacggaggaagctgaggccacagggagcggccatcgccattgggaaggggcgactccacggaaagcccagacgggcttctgcatccattccctctttttgtttttaaaataaattgtatttttgaatcaaggaggataaagataacttctcagtgtcatttttgataattgcattgagaacgatgagctccttcccaggttctgggcactgttggggatccgccgtctcaagaggctcacggtctggtttaggggaaccccagggctgtttgtggaaattacaagaattcacttacccggtgagtcagactccaggagctcacaggtgcgtgggcgctggcacttcctaggagctgactcctgccacatccctctcctgagcactgctgccagccattctcacccctgagagggtttgcagtcctgtctgcgacagtacttcatgcagcctgagagtgtgtgcttgattgtacaagtagatgttgtgtaaacctgagttttcagagtgacttcctgtaagcacagtcagaaaagtaaatgtctctctgtaagtgagcagataagcacatgcttaaaaacaccagctgggcgtggtgactcgcacctgtaaccctagcactttgggaggtcaaggtggaaggatcgtttgagctcagagcttccagaccagcctgggcaacatggtgaaaccccatctctgcaaaaaatataaaaattaagtgggcgtgttggcgtccacctgtggtcccagctacttgggaggctgaggtgggaggatcacctgagcccaggaagcagaggttgcagtgagctgagactgagccaccacacaccagcctgggtgacagagtgagacactgtcttaaaaccccaatatcccaatttttgagtttgctgaggttgccagccaagttaatttttcttaacagccataacagactataatatagacaatgtgatcgatttatttaaagtcaaccagctgggcgcggtggctcacgcctataatcccagaattttaggaggctgagccaggtggatcaccggaagtcaggagttcgagaccagcctggccaagccgggagtggtggcgggcacctgtaatcccagctacttaggaggctgaggtgggagaatcgcttgaacccaggaggcagaggttgcagtgagccaagatagcgccactgcgctccagcctgggtgacagagcaagattccatctataaataaataaataaataaagtcaatcaggactgccttctgcctgtgtgggcctggccaggctaagcagccacacaaccctccctacctgctgggccacccctggctgaaaacctctctggaatgcctctcttgggattgccttcagagattgcaacacattctccaaacaccctcagtggacatagactttgatccttgaagcagcagatttgactaagtaaaaaagaaaaagctattaaaaccagttggctgggcgcggtggctcacgcctgtaatcccagcactttgggaggccgaggcaggcggatcacgaggtcaggagatcgagactatcctggctaacacagtgaaaccccatctctaccaaaaatacaaaaaattagccgggcgtggtggtgggcgcctgtagtcccagctactcaggagactgaggcaggagaatggtgtgaacccgggaggtggagcttgcagtgagccgagatcgcgccactgcactccactccagcctggcgacagagctagactgtctcaaaaaaaaaaacagaggcgtgccaaagctcagcagaaaatgccgcctcatcactcttcctcttgccagtcttgtgggggcaccaaggcctagagtaacacccagctgttggcctgacagtgcctggcccagcctggagagttgcagccagaagtataaatgtggttcagtctgcgtcatacctgtcaggaaacatggtgagaccaactgctgcccagacggattttcaaaagaaatgggtcagaacgtattcccccacactggaatccctcagccagattgaggataaaaacaggcatcagaaaaaaatgatacaggcaggcctggtggctcatgcctgtaatcccagcactttgggaggctgaggcgggaggatcgcctgagcacaggagtttgagaccagcctgggcaacacagtgagaacctatctctactaaaaatagaacaattagccaggcacggtggtgtggctgtggtcccagctactctggaggctgaggtgggaggatcacttgagccctaggggtagaggctgcagtgagcggagatcaccccactgcaatccagcctgggcaacagatcaagaccctgtctcaaaaaaaaaaaaaagaaaagaaaacaaaagaaaaatatgatacactgactagaatgtgctttaaaataattggcatagttgggtatggtggcatgcacctgcagtctcacctacttggaaagctgtggccaggagtttgagaccagcctgggcaacacagcaagacctcatctctataaaaaataggcggggagcagtggctcacgcctgtaatcccagcactttgggaggccaaggcaggcggatcactagaggacaggagttcaagaccagcctggccaacatggtgaaaccccatctctactaaaaatacaaaaattggcaggatgtggtggcgggtgcctataatcccagctacttgggaggctgaggcaggagaatcgcttgaacctgggaggcagaggttgcagtgagccgaggtcatgacactgccctcaaacctgggtgacagagcaagactcggtctcgaaaaaaaaaataatgaatgaatgaattaattcattaattaaatagggggggtatatgagtttgttagggctgccgtaggagtgccacaaactgcaggggttgggggggttagtcaacagaaatttattctgtcctgtttctggaggctggaagtccaaggtgaagaacagggttagctccttctaagggaaaatctgttccagatccctctcctagcgtctggtggtttgctttgctgactatctttgacattccttggcttgtagccacactgcttcagtctccaccttcatctttacatgatgttgtccctgtgggtatgtgtctgtttctgtgtctaaatttctcctttttatttttttcttttttctctatctttttttttagacggagtcgcgctctgttgcccaggctggagtgcagtggctcgatctcggctcactgcaacttctgcctcctgggttcaagcgattctcctgcctcagcctcccaagtagctgggattacaggcgcccaccaccatgcctggctaatttttgtgtttttagtagagaaggggtttcgccatattggccaggctggtaacctcaggtgatccacccgctttggcctcccaaagtactgggattacaagcgtgagccaccgaacctggcctattttttcatttatttttagacagagttttgctcttcttgtccaggctagagtacaatggcgcaatctcggctaatctcaacctccgcctcccgggttcaggcgattctcctgcctcagcctcccaagtagctgggattacaggcatacgccacaatgcctggctaattctgttttgttagcagagatggggtttcaccatgttggtcaggctggtctcgaactcccgacctcaggtgatccacccacctcagcctcccaaagtgctgagattacagacacgagccactgagcctggccctctcctttttatttttaaaatatattttgtggacggcagcagtggctcacacctgtaatcccagcactttgggaggccgaggcgggtggatcacaaggtcaggaactcgagaccagcctggccaatatggtgaagccccatctctactaaaaatataaaaattagccaggcatggccgggcgcggtggctcacgcctgtaatcccagcactttgggaggccgaggcgggcggatcacgaggtcaggagatcgagaccatcctggttaatacggtgaaaccccgtctctactaaaaatacaaaaaaaaaattagctgggcgaggtggcaggtgcctgtagtcccagctactcgggaggctgaggcatgagaatggcgtgaacccgggaggcggagcttgcagtgagctgagatcgcgccactgcactccagcctgggtgacagagtgagactccatctcaaaaaaaaaaaaaaaaaatttagccaggcgtggtgtcagaagcctgtagtcgcaactacttgggaggctgaggcaggagaatcacttgaacccaggaggtggaggttgcagtgagccgagaccacatcacggcacatctaaaaaaaaaaaaagttttctgtttttgttttttgcaaaactactgaaataaatacagtgagatatttatttataaatgagaacgaattaataatgagccgtaggctgggtgtggtggctcatgcctataatcccagcattttggggggccaaggcaggtggaacacttgaggtcaagagttcgagaccaggctgaccaatatagtggaaccccatctctactaaaaatacaaaagaattagccgggcatggtgccgggcgcctgtaatctcagctatgggaggctgaggtaggagaatcgcttaaaccctggaggcggaggttgcagtgaggcgatatcacgccactgcactccagcctgggggacagagcgagactccatctctaaataaataaataaggagctgtatttcaaaatttggagaaggtgacactgagagtactgaatacacagttttttgtttttttggttttttttgagacagagtctcgctctgtcacccaggctggagtgcagtggtgcaacctcggctcactgcaatctctgcctcccggttcaagcaaatctcctgcctcagcctcccgcgtagctgggattacaggcacgcatccccatgcctggctaatttttgtatttttagtagagacgggatttcaccatattggtcaggctgatctcaaactcctgacctcgtgatctgcctgcctcggcctcccaaagtgctgggattacaggcgtgagccaccgagcctggccccaaaaaatatttatcaaaactatgttaatgctggccgggtgcggtggctcatgcctgtaatcccagcactttgggaggccgaggcaggtggaacacgaggtcaggagattgagaccatcctggctaacacggtgaaaccccgtctctactaaaaaatacaaaaaattagccgggcgcggtggtgggtgcctgtagtcccagctactcaggaggctgaagcaggagaatggcaggaaccggggaggcagaggttgtagtgagctgagatcgcgccattgcactccagcctgggcgacagagcgagaatccgtctcgaaaaaaaaaaaaaaatacacacacacacacaaaaactgtgttaatgcttaactacacaaaaatgataatcagataaatatgcatttatttagagaactgcatgttggtcagtccagtccctgcagagggaattcccagcatgacctcattcacttgtgaagacagagcaatccttgtgttttatttttttaagatggatctcactctgttgcccagactggagtgcagtggcatgatctcagccctctgccacctccaccttccgggttcaagagattctcatgcctcagcctcctgagtagctgagattacaggcttgtgcctccatgcccagctaatttttttatttttactagagatgaggtttcaccagtttgggcaggccggtctcaaactcctgacctcaagtgatccacccacctcggcctcccgaagtgctgggatgacaggtgcctggtcagcaactgttgtttagacatacacattttatctgctcgtccagcatggtcagccctccactttttaaattttattttatttatttttttgagacagagtctcactctgttgtccaggttggagtccagtggcgtgatttcggctcactgcaacctctacttcccaggttcgagcaattctcctgcctcagcttcccgagtagctgggattacaggcccgcgtccccacacctagctaatttttgtatttttagtagagacagggtttcaccatgttggccaggctggtctcgaactcctgacctcaggtgattctcctgccttggcctcccaaagtgctgagattacaggtgtgagccactgcacacggccttaaattttatttattatttatttatttatttatttagagacttagtctcactctgttgcccaggctggagtgcagtggcatggtctcggctcactgcactccacctcctgggttcacgccattctcctgcctcagcctcccgagtagctgggactacaggcgcccaccaccactcccggctaatttttgtatttttagtagagatggggtttcactgtgttagccaggatagtctcgatctcctgacctcgtgatccgcctgcctcggcctcccaaagtgctgggattacttattttgttttttgtagagacaggttctcactgtgttgcccaggctggtcttgaactcctgatctcaagtgatcttcccacctcagtctctcaaagggctgggattacaggggtgagccactgcaccccaccttccctctactttttgacggtttccttctgctatgaatgtgcatgtccagttgtctgcttcttagaactgatatttaccttcctcatccatcagccattggaggaggactgggaccgctcagattattgatctgacccattctttcggcagggtttcctggtggctgtcttccatcaccaaaactggaatcagaagagtttccatagccctttttttttccccacatctttgctgaagcagagttttgaaaaacaaaaccacaaactaagctattccccagaagaaatctgtaatcaaagataagctctgccgggcacagtggctcacgccttttggaggccaaggcgggcggatcacctgaggtcaggagttctagacctgccaggccaacatggtaaaacctcatctctactaaaaatacaaaaattagctagatgtggtggtgggtacctgtagtctcagctacctgggaggctgaggcaagagaatcgcttgaacctgggaagtagaggttgcagtgagccgagattgcaccactgcactccagcctgggcgacggagtgagacgacctcacaaaaatttacataaataaaatgaaaagtaaaataaaaatacaaaagttggccgggtgcgtttgctcacgcctgtaatcccagcactttgggagggtgaggcaggcagataatgaggtaagaagatcgagaccatcctggctaacacggtgaaaccctgtctctactaaaaatacaaaaaattagctgtgcgtggtgacacgcacctgtagtcccagctatttgggaggctgaggcaggagaatcacttgaacctgggaggtggaggttgcagtgagccgagatcgcaccactgcactccagcctgggccacagagtgagactccatcttgaaaaaaaaaaaaaatacaaaagttagccaggggtgttggtgggtgcctgtaatcccagctatttgggaggctaaggcagaagaatttcttgaacctaggaaacggaggttgcagtgagccgagatcacacctctgtactccagcctggacaacagagcgagactttgtctcaaaaaaaaaaaaaaaaaaaaaactaaataggccgggagcagtggctcatgcctataatcccagccctttgggaggccaaggcaggtggatcacttgaggtcaggagtttgagaccaggctggccaacatggtgtaaccccgtctctactaaaaacacaaaaattagccgggtctggtggcgtatgtctgtaatcccagctactcgggaggctgaggcaggagaatcacttaaacctgggaggcaggggttgcagtgagctgagatcgtgccactgcactctagccagggtgacagagtgaaactctgtctcaaaaaattaaaaaagaaattcagcaagtaatgagttaaggaattcgaatattaaggcgagtgacaaggaacgcccaggatgtggcccaggatggagtaggggggacactcatttaggagaaagctcaggccacaagacaggaggagccagccttgttggggttgaagggaagagcattccaggctgagggaactgcaaggcgtttgcatgggacactatgggatggcttctgcccttggtgggcagcctctggtctgaggccattctttggcctgcctgactgtctggcaaccgggaggaagccctgcccttcctggagacagaaacaaaggtctaggaaatatctgcttcccttttccttgaaaaacgcttaagggaacggaggactgggaggtgccgtctctctctgccagcctgccccctaccatagccatcccactcccatctcagaaagtgacccgccatcctccaaaaggctcggaccctgatcaaggagtcatcccccttgtcccagcacctccagttggcccagcctccaaaacggatgtcaaattcagccctttctccaaggacactgcccagtccaggccccactatcattcatctggactagaacagtcacctcctctcccatctcctggctgcagctcttgaagcctcaactgggcccctgtgaacacttgagttagggcaaggtccttcctctgctcagaaccctctatacctcccacctcgctgggcataaaagccaaagtcctggccaggcacggtggctcacatctgttatcccagcactttgggaggccaaggggggcggatcactagaggtcaggagttagagaccaacatggtgaaaccccatctctactaaaaatacaaaaattagctaggcgtggtgacgcacccctgtagtaccagctactcggtaggctgaggtgggagaatcgcttgaacctgggaggcagagtttgcagtgagccgagatcacaccactgtgctccagcctgggtgacagaacgagactggggttcagaaacaaacaaacaaaacaacaaagtcctcctcaggtgacaggaacttgcacctatctgccctgtcatctccctgcccgctcctctcctcgaatctctcctttgctaagcctgctccagccacactgttctcctggctgttcctttttttttttttttttttttttttttgagtctcactctcacccaggctggagtgcagtgcctctatcttggctcactgcaacctccgcctgccgggttcaagagattctcctgcatcagcctcccaagtaggtggaattacaggtgtgcaccaccacacccggctaatttttgtattttgcatagagatgggggtctccctatgttgcccaggctggtcttgaactcctgggctcaagtgatcctcccatctcggcctcccaaaatgctgggattacaggtgggagccgcgcccaggtggatttttgtctgactctgttcattcctgtgtccccagtacctggaaggacgccaagcacacagtaggcgcttaaaaaacattgagccacatgttgagaaaagaacggcaccattgtggctgcaagtgggacttgggccgcgcgggggagctcgcgcacctcgggccggggcaagagctcagtggaacccgcccgaggaagaacccgtggcgcaggattttcccaggccttctgaggaccaggggcgtcccccgtcccaccctgtgactttgctcaggccgttccggggcgggaattcagaactcctcagccccccaagaaaaaaatatccccgtggaaattccttgggaatgaccgaggcgggggaaatatgcgtctctggatggccagtgactcgcagcccccttccccgataggaagggcctgcgcgtccggggacccttcgcttccccttctgctgcgcgacctccctggcccctcggagatctccatggcgacgccgcgcgcgccccacaacaggaaagccttaggcggcgcggcttggtgctcggagacttaagagtacccagcctcgacgtggtggatgtcgagtcttggggtcacacgcacaggcggtggccaagcaaacacccgctcatatttagtgcatgagcctgggttcgagttgccggagcctcgcgcgtagggcaggggttcgagcgccccttctccctgcctcgcctctgcgcctgggggctgctgcctcagtttcccagcgacaggcagggatttcgagcgtccccctcccctccctcgtcaagatccaagctagctgcctcagtttccccgcggagcctgggacgccagcggaggggctcggcgcgtagggatcacgcagcttccttcctttttctgggagctgtaaagacgcctccgcggccaaggccgaaaggggaagcgaggaggccgccggggtgagtgccctcgggtgtagagagaggacgccgatttccccggacgtggtgagaccgcgcttcgtcactcccacggttagcggtcgccgggaggtgcctggctctgctctggccgcttctcgagaaatgcccgtgtcagctaggtgtggacgtgacctagggggaggggcatccctcagtggagggagcccggggaggattcctgggcccccacccaggcagggggctcatccactcgattaaagaggcctgcgtaagctggagagggaggacttgagttcggaccccctcgcagcctggagtctcagtttaccgctttgtgaaatggacacaataacagtctccactctccggggaagttggcagtatttaaaagtacttaataaaccgcttagcgcggtgtagaccgtgattcaagcttagcctggccgggaaacgggaggcgtggaggccgggagcagcccccggggtcatcgccctgccaccgccgcccgattgctttagcttggaaattccggagctgaagcggccagcgagggaggatgaccctctcggcccgggcaccctgtcagtccggaaataactgcagcatttgttccggaggggaaggcgcgaggtttccgggaaagcagcaccgccccttggcccccaggtggctagcgctataaaggatcacgcgccccagtcgacgctgagctcctctgctactcagagttgcaacctcagcctcgctatggctcccagcagcccccggcccgcgctgcccgcactcctggtcctgctcggggctctgttcccaggtgagtcggggtggggattgccgtcgggccagttctccgaagccccgggaggaccggctcccgggtcaggtcatgcatgcttaggtagctgtttatgggaaggaggggctagagacagcgattgaaaggcaacagccagtaggttcgaatccagaccctgcatacctccacgtgtggccttgggctatagattgcagctttaaaaaagggtagggggttggagatggaggggaggggcgggcctcgttttgttgcccaggccggtcttgaactccgggggtctagccttacctcctgcctcagcctcccgagtagctgggatgagaggtgtgaaccaccgccttgcttggctagattgcgtctcttacagtttctcagctgtaaaacgggaaacgttatagcggccacctggcagggtatcttggcccagcgcagcacctggccccaggactcgatcatgatggtttgggaacttggctctgtgccaacccaacaaggcttaagggacccccacccccctcaagatgtatattctgttcctcatcctctctgcccctggggaagtccagggctgcttctacttgggggaattccagagctgacttatccgtggcccaaagctgagaagtgggacgccccagcacaccctcccccagctccagcccagctagggaagagggaaggggtcagagggtctttcatggtggtgtaagtttggggaaccaggagggtgggagattgacagcttggttaacagctcaacaaagcctgagatccaggccagcacggtagttcatgccagtaatcccaacactttaggagccccaggcgggcgaatcacttaaggtcaggagtttgagaccagcctggccaacatggcaacatcccgtctctactaaaaatacaaaaattagctggcatggtggtgggcgcctgtgatcccagctgctcgggaggctgagggaggaaaatcccttaagcccacgaggctgaggttgcagtgaaccaagattgtgccactgcactccagcctgggagacatagcgagattctgtctcaaaaaacaaagcgttctgatccggactcagacccagatcgcactgctttctagctgagtaaccatttctctctatgaaatgggaatggtcccagaatctcccttggagaatgtatggagccagtgtcctcacacccccatccaagatagaacaaatctgagacaggaatctttgagtgaggcagtgctgggctcagacattttttcccaccttcggaggcagcagaatctgagggacctgatccaaataagccccttctttctttcttttcttttcttttttttttttttttttttttgagacggagtctcactctgtcgcccaggctggagtgcagtggcgtgatctcggctcactgcaacctctgcctcccaggttcaaacgattctcctgcctcagcctccctgagtagctgggactacaggcatgtgccatcacacccggctaatcactgtgttagccaggatggtctcgatttcctgacctcatgatctgcccaccctgcctcccaaagtgctgggattacatgcgtgagccacagtgcccaccccgtaagccccttctttcttacctgcaaggtagccagttgctacccatcctgtgctgagttacttgtattagcaagggatggggtggctatactcacccaccttacagatggggaaattgaggcccaaagagggggaaactacgtgtctcagggagtgaggagccagtctgattcctggagggctgactgtctccacctgacttcttaggagggaggagggcaccaacttcacattaaaatctggttggacacagtggctcacacctgtaatcctggcattttgggaggcttaggcgggaggatcacttgaggccaggagtttgagaccagccttagcaacatagtgagaccccatctctacaaaaatgtttttcagggccaggcgcggtggctcacacctataatcccagcactttgggaggctgaggcgggcggattacctgaggtcaggagtttgagaccagcctgaccaacatggagaaaccccgtctctactaaaagtacaaaattacccgggcgtggtggcgcatgcctgtaatcccagctactcgggaggctgaggcaggagaatcgcttgaacctgggaggcggaggttgcggtgaactgagatcgtgccattgcactccagcctgggcaacaagagctaaactccgtctcaaaaaaaaaaaaatgtttttcaaatattagccgggtatggtggtgtcctgtagtcccagctacttgggaggctgagatgggaggatcacttgagcccaggagttcaaggttacagtgagctatgattgtgccactgtattccagcctgggtaacagagggagacccgtttaaaaaaaaaaaagtgatggctaaagtccttccatggctccctattgccctcagtataaagaacacatgtggctgggcgtggtggttcacgcctgtaatcccagcactttgggaggctgaggcgggcggatcacttgaggccaggagtttgagagcaggctggccgacgtggcgaaaccccgtctctattaaaaatacaaaaattagctgggcgtggtggtgcttgcctgtaatcccagatactctggaggctgaggcaggagaatcacttgaacccgggaggcaaaggttgcagtgagctgagattgcgccactgcactccagtctgagtgacaaagcgagactccatctcaaaaaaaaaaaaaataaaagaacacatctttagcatggccttcagtgctcacgggatcttcctgaattaatctccccctcttcatccttgctcactcagctccagccaccctgccccgggacatctgtacttgcctggaacttatttcccttttctccggacagccagccctttctcgtcatttagatctctgctgaaacattaccctgtcaccaaagcactgtctattctatcaccctgttttgtttttgtcaaagctcatattaacatcagttattaattatcttgtttgctcataatttttttttttttttttttggagacagagtctcgttctgttgctcaggctggagtgcagtggcacaatcttggctcactgtaacctccacctcccaggttcaagtgattcttgtgcctcagcctcccaaatagctaggactacaggcacgtcccaccatgcccagctaatttttgtatttttagtggagacggggctttgtcatgttggccaggctgatctcaaattcctgacctcaagtgatctgcccgccttggcctcccaaagtgctgggattacaggcgtgagccaccacacccggcctgctcatgaattttctctttaacttccacatcgaaggcaaagtattgtcttgttaaggctgtgcctccagcacccagcacaggctgggcgcacattcccttgatgaacctgatttgtaatgcctgtcgcctcttccctcgtttcttctaggacctggcaatgcccagacatctgtgtccccctcaaaagtcatcctgccccggggaggctccgtgctggtgacatgcagcacctcctgtgaccagcccaagttgttgggcatagagaccccgttgcctaaaaaggagttgctcctgcctgggaacaaccggaaggtgtatgaactgagcaatgtgcaagaagatagccaaccaatgtgctattcaaactgccctgatgggcagtcaacagctaaaaccttcctcaccgtgtactgtgagtaactgagcccggagggctggactaggcagacccggtgggagagacgtgcaggggcacctgcagaggcctgggggaatctttgccacttgctcgtagggtcaaggaggggctccttgcagggcaggtggggacatccttggaaagtccctttgtgaatttctttgggtacaattaaagtatttacaggctgggtgcggtggctcatgcctgtaatcccagcactttgagaggctgaggctggcggatcacctgagatcaggagtttaagtttcgccaacatggcgaaaccctgtctctgctgaaaatacaaaaatcagccgggcatggtgtcaagcgcctgtaatcccagctacttggaaggctgaggcaggagaacgcttgaacctgagaggcagagattgcagtgagccgcgatcgtgccagtgcactccagtctggataacagagcaagattccatctcaagaaaaaaaaaatgccatctctctatgcctcactctttgaacatatgacacggtcctgcttcagacactttaataaaagatgcaaattaagccaagtgtggtggcttgtacctataatcccaactactccagaggctgaggcagaaggatggtttgagcccaggagtttgagaccagcctgggcaacagagtgagaccctgtttctttcttttttttttttttttttttgagacggagtctcactctgtcgcccaggctggagtgcagtggtgtgatctcggctcactgcaagctccgcctcccgggttcacgccattctcctgcctcagcctcccgagtagctgggactacaggcgcctgccaccatgcccggctcatttttttgtatttttagtagagacggggtttcactgtgttagccaggatggtctcaatctcctgacctagtggtccgcccgcctcggcctcccaaagtgctgggattacaggtgtaagccactgtgcccatccaagaccctgtttctaccggaaaaaaaaagtaaataatttagctgggcatcgtggtgtgcacctgtaatcccagctgctcctgaggctgtgatgggaggattgctttaacccaggggttcgaatcctaggagttcgaatccatcctaggcaacatagcaaaaccccatttttatttaaaaaaaaaaaaaaagatatgagttaaaactagccctgggatggcatttttcacatattggtaacaaacaaaagaattgatggccgggcgcagtggctcacgcctgtaatcccagcactttgggaggccgaggcgggcggatcacaaggtcaggagatcgagaccatcctggctaacatggtgaaaccccgtctctactaaaactacaaaaaattagccgggcatggtggcaggcgcctgtggtcccagctactcaggaggctgaggcaggagaatggcatgaacccgggaggcagagcttgcagtgagccaagatcgtgccactgcactccagcctgggcgacagagcaagactccatctcaaaaaaaaaaaaaaaaaaaagaattgataacagctgtgctgccaaggctattggaacgtaggaggtcctaggacagtgctgttgggagcataaataagcccaaccctgtggcgggaaattgggcatcagttctcaaaatgtcatgggctgggcacggtggctcacgcctgtaatcccagcactttgggaggctgagggaggcggatcacttgaggtcaggagttcgagaccagcctgaccaccatggagaaaccccgtctctattaaaaatacaaaaaaaactagccaggcatagtggcacatacctgtaatcccagctactcgggaggctgaggcaggagaatctcttgaaactgggaggcagaggttgcggtgagctgagattgcgccactgcactccagcttgggcaacaagagcaaaactccatctcaaaaaaaaaaaaaaaagaaataaaagaaggtatgttgaatatgagtggtatgccaccctcacattagggaagggcagtttcggggaggctgtatttatgtataaaatagccctaaaaggaagtgggagaaatgacaatattagctggctatgagaagagaggctgggaggctgtgggagagggcttgggtgtggagaattctttttgttttttcctttttttgagacagagtttcactcttgttgcccaggctggagtgcaatggcacgatctcagctcaccgcaaccttcacctcctgagtttaagtgattctccggcctcagcctcccgactagctgggattacaggcatgggccactacgcctggcaaattttgtatttttagtagagacagggtttctccatgttggtcaggctggtcttgaactctgacctcaggtgatccgcccgcctcggcctcccaaagtgctgggattacaacgtgagccactttgcctggctgagaattctttttttgttgttgtctttttgagatggagttttgctgtgtccccagcctggagtgcaatggtgtaatctcagctcactgcaacctctccctcccgggttcaagcaattctcctgcctcagcctcccaagtagctggaattacaggcgcccagcaccacgcccggctaatttttgtatttttagtagagacgggatttcatcatgttggccaggctggtcttgatctcctgaccttgtgatctgcccgcctcggcctcccaaagtgctgggattacaggcgtgagccactgcccccagccgagaatttctctttgcgtccttcctactttggggacttcgaatggtgggaaagagttatcaaggccaaaataaggaattcaaatgaaaacaaaacaaaatcaaagaagaaaaaacagaagagcactgggcaggctaggcacgtggctcatgcctataatcccagtgatttagaaggccgaagtagaaggatcgcttggaggccaggagttggacaccagcctgggcaacatagcaagaccccatatctacaaaaaataaaaaacctaaccaagcgtgctggcatactagtagtcccagctactcaggaggctgaggtgggaggatcacctgagcctgggaggtccaggctgtagtgagccgtgatgacaccactgcactccagcctgggtgacagagaaagaccctgtctctaaaaaataaaaactggccaagtagctttgggattagccttgggttccagtcccagcaaggcctttaatagcttgggacatgacttctgcatttactttgcaatcaggtgagacctcctctgatggggaaaatgacacggtgagtgacaaaggatgttctcctatcattgtgtcagggcaaggaagcctctgggtaaatgatcaaatgatcagctttgcttctgatttggagggtgggtgagcagatgctgaccttcccaggtgagggaagtccccgaacattcccagcagcttctggaaaccccagggaaacctctttgaaggtcttttctgcatctctgcctgataggtctttttttttttttttttttttttcttttttttgacacacagtcttgctctgtcgcccaggctggatcactgcaacctccatctcccgggttcaagcagttctcctgcctcatcctctccagtagctgggattacaggcacctggcaccacgcctggctaatttttgtatttttagtagagacagggtttcgccaagttggccaggctggtctcgaactctagacctctggtgatccacccgcctcagcctcccgaagtgctgggattacaggcttgagccaccacgcgcggctctgcctgatagctgagagcatagaactccaggtttgagacctggctctgccacatttctccctctatgactgtgggtgccccactttgccttagtttttacctctgtgaaatggagcagatggctggcacaggtagcaaaggagtaaaagttatgtgggagggtggtacctgagagagactctagcttggtcttgccccacccctggtgtaaacataaagaagcctccctggatggctcaatcttctccaaaaaggttagaggtgtaattcctagaggaggcgaccactagctgggctttgaaggatgtgtaggagttcataaggacaggcattctgggcaggaggaacagcctgggcaaaagttgggagcagggagaaatcttgatggaggcaggaggaggaggaggtaggttggtgtaggccaggtgcagtggctcacacctgtaatcccagtgctttgggaggccaaagcaagaggattgtttgagcccaggagttcgagaccagcctgggcaacatagcgagaccctgtctctaagaaaaaataaaaaaattagggtacagtggcatatgcttgtattctcaactactctggaggctcaagtgggaggatcacttgaacccaggaatttttttgtttttgtttttgtttttttgagatggagtctcactctgtggcccaggctggagtgcagtggtgccatcttggctcactgcagcctcctccacctcctgggttcaaccgattctgctgcctgagcctcccgagttgctgggattaaggtgcccaccatcatgcccagctaatttttttgtatttttagtagagatagggtttaccatgttagccaggctggtcttgaacgcctgaccgcaagagatcctcctgcctcagtttcccaaagtgctgggattataggtgtgagccactgagcctggtcaagcccaggaatttgaggttacagtcagctatgattgcaccactgcattccagcccaggtgacagagagagacactgcccctaaaaaaaaaaaaaaaattgattgatgggaggaagggtgaggttggcagagccttgaatgccaggtggaggagctgggactttccttcttggggtgatagggagtcatggagggtttctgagcaggccagggattagatagctgaaggctggatttactggaagccaatgagcagttggctatggtccttgtccacgcggcccatgttgtgggcagtgaccgtattcaagaagggaaggacagacaagtatttgaatacttcagtgaccaggatttggtaaaggactgcaggtcagggtcaagaagaggtgagagcaggacagacttcctccccgctgcaccaggcagctgagctgggtttcctctaggggctgaggtttgagggtacctcaagttctgcaagagtctataggaggtggtaagagagaagagctggaggtcagagttttcttgactatatatatatatatttttttgtttttgtttttaacagcttaacagctttctgttttatttttagagacagggtctcagggtctcactttgtcacccaggctggagtgcagtggtacaatcgtagctgactgcagcctcaaactcccaggctcaagaaatcctcctcccacccttagcctcctgagtagcagggactacaggtgtgagccagcaggaagcccagctggttttttttttttctttggtgttttttgtttgtttgtttgagaccggagtttcgctcttattgcccaggctgaagtgcaatggcaggatcttagctcaccacaacctccgacccccaggatcaagctattctcttgcctcagccacctgagtagctgggattacaggcatgcgacaccacacaaggctaattttgtatttttagtaaagacagggtttctccatgttggtcaggctggtctcgaactcccaacctcagatgatccacctgcctcggcctcccaaagtgctgagattacaggcatgagccaccgtgcccggcctttttttttttttttttttttttgagacagagtctcactctgtcgcccaggcaggagtgcagtggttcgatctgggctcactgcaagctccgcctcccgggttcactccatcctcctgccttagcctcctgagtagctgggactacaggcgcccaccaccacgcctggctaattttttgtatttttagtagagacggggtttcaccgtgttagccaggatggtcttgatctcctgacctcgtgatccgcccgccttggcctcccaaagtgctgggattacaggcgtgagccaccatgtctggcctggccaggctggtcttgaactcctgacttccggtgatccatctgttctggcctcccaaagtgctgggattacaggcataagccaccacgccatgccgaagcccagcttgtttttaatttttttttttttttttggagaaatgaggtcttgcaatgttgcccaagctagccttgaactcctggcctcaaatgaccccgccttggcatcccaaagtactgggattacagatgtgagccaccatgccccagccttgctttcttgagatacgatttagaataccataagattcatcccttttaagcacataattcaatgacttctgtacaaacaaccatgactacaatctaattttaaaatatttcaatcactctaaaaaagaaacctcctgcttatgtacagcgactctgtctacctcttaagtgaattctcctacctttaatagccctattttacagttcaggaaactgaggttcagagagacaaagtcacttacccacagcaaagaagcaaggctgggtatcaaatgcaggacccccccggtcctgatgctttttttttttttttttttttcctctgagagagactctcactctgtcactcagtctagagtacagtggcgcgatctcagttcactgcaatctctgcctcctgggctgaagtaatcctttcctcacaagtaaacctcagcctctcaagtagctgggactacaggcacacaacaccacgcctggctaatttttgtatttttaggtagagacggggtttcactatattggccaggctggtcttgaactcctgacctcaggtgatccgcctgcctcggccccccaaagtgttgggattacaggcgtgagccaccacacgcagcctttttgttattagactctgtcattactgacttttttttttttttaatagaaacagggtctttctttcccaggctaaagtacagtggcatgatcacagttcactatagccttaaactcctgggctcaagtgatcctcctgcctcagcctcccaagtagcagggactacaggtgtgcaccaccacacccagttaaccattcattcattcattcattcatttattttgagatggagtctcgctctgtcacctaggctggagtgcagtggcacgatctcagctcactgcaacctccacctcccaggttcaagagattctcctgcctcagcctcccgagtagctgagactacaggcgtgcaccaccatgccagactaatttttgtatttttaatagagacggggtttcactctgttggtcaggcttatctcgaactcctgacttcgtggatccaccctccttggcctcccaaagtgctgggattaaaggcgtgagccaccgcgccctgccaacctttttttaatttttcttagagatgggggtctccctatgttgcccaggcttgtcttgaactcctggcctcaagtgaccctcttgccttggcctcacaaagtgctaggattacagcctgagccatcacacctggccaacaggtttttttttttgttttgttttgttttttaaagaatgtctaggccaggctcatttactttcacctgtaatcccagcactttgggaggccggggtgggcagatcacttgaggtcaggaattcgagaccagcctgggcaacatgctgaaaccccgtttctactaaaaatacaaaaattagctgggtgtggtgacacgtgcctgtaatcccagctactcaggaggttgaggcaggagaattgcttgaacccaggaggcagaggttgcagtgagccaagatcatgccatcaccctccagcctgggcgacagaaggagactcagtctaaaaacttaattaattaattaattaaaaataaaaatacaaaaattaacctggtgtggtggtgtgtgcctgtaatctaagctactcaggaggctgaggcaggagaatcccctgaatcccagaggcagaggttgcagtgagccaagatcgagccactgtttgcccagtctagtgcactgggctgctgaatttatttgaccagacacctagcaatagactttgaagttcttttccacttttcactctaagatgctgctgtcatgaataaggaatattttgatccccttcacaaacactcggggccctcttaccagttttcactgaagatcttgacattcctatctgcttaggtgtctgggcgtgtttgggggagatactgaagaggtagggctcccaggcaggtgcagttcgtctgttaggcaggcagcaaggtccacttcaccagacacccccacctctgttttcctgcagggactccagaacgggtggaactggcacccctcccctcttggcagccagtgggcaagaaccttaccctacgctgccaggtggagggtggggcaccccgggccaacctcaccgtggtgctgctccgtggggagaaggagctgaaacgggagccagctgtgggggagcccgctgaggtcacgaccacggtgctggtgaggagagatcaccatggagccaatttctcgtgccgcactgaactggacctgcggccccaagggctggagctgtttgagaacacctcggccccctaccagctccagacctttggtgaggattgaagaagccagcagggagaaggtgggggtggggtatcctgcaatgcggtgcctgtggccacaggatcttttgagatgggtgtggccccggctaaggggtgcatgtgttctaggcgtatgtgacctaggctgctgagtggccctggaagaggatctcgcaggagggggaatgaaatgccccagagaagggcttcgggacgtccatccctgtctgctcacacctttcttctctccctagtcctgccagcgactcccccacaacttgtcagcccccgggtcctagaggtggacacgcaggggaccgtggtctgttccctggacgggctgttcccagtctcggaggcccaggtccacctggcactgggggaccagaggttgaaccccacagtcacctatggcaacgactccttctcggccaaggcctcagtcagtgtgaccgcagaggacgagggcacccagcggctgacgtgtgcagtaatactggggaaccagagccaggagacactgcagacagtgaccatctacagtaagaaggggcaggggcggagtggggcttcttgggggtgtgacctgaacccggggcggggctcactgtgtgcctattccaggctttccggcgcccaacgtgattctgacgaagccagaggtctcagaagggaccgaggtgacagtgaagtgtgaggcccaccctagagccaaggtgacgctgaatggggttccagcccagccactgggcccgagggcccagctcctgctgaaggccaccccagaggacaacgggcgcagcttctcctgctctgcaaccctggaggtggccggccagcttatacacaagaaccagacccgggagcttcgtgtcctgtgtgagtggggctgctggtcaatggcccctatcccccaaggcccaatctccctgaaggtcccataaggtcttgcctccaagtcctgcccccacccacctccatgtcatctcatcgtgtttttccagatggcccccgactggacgagagggattgtccgggaaactggacgtggccagaaaattcccagcagactccaatgtgccaggcttgggggaacccattgcccgagctcaagtgtctaaaggatggcactttcccactgcccatcggggaatcagtgactgtcactcgagatcttgagggcacctacctctgtcgggccaggagcactcaaggggaggtcacccgcaaggtgaccgtgaatgtgctctgtgagtgagccggcgggcagagctgggtgggggcaggggccatggacctaatgcaatcctcaccgcctgttgtatcctccccacagccccccggtatgagattgtcatcatcactgtggtagcagccgcagtcataatgggcactgcaggcctcagcacgtacctctataaccgccagcggaagatcaagaaatacagactacaacaggcccaaaaagggacccccatgaaaccgaacacacaagccacgcctccctgaacctatcccgggacagggcctcttcctcggccttcccatattggtggcagtggtgccacactgaacagagtggaagacatatgccatgcagctacacctaccggccctgggacgccggaggacagggcattgtcctcagtcagatacaacagcatttggggccatggtacctgcacacctaaaacactaggccacgcatctgatctgtagtcacatgactaagccaagaggaaggagcaagactcaagacatgattgatggatgttaaagtctagcctgatgagaggggaagtggtgggggagacatagccccaccatgaggacatacaactgggaaatactgaaacttgctgcctattgggtatgctgaggccccacagacttacagaagaagtggccctccatagacatgtgtagcatcaaaacacaaaggcccacacttcctgacggatgccagcttgggcactgctgtctactgaccccaacccttgatgatatgtatttattcatttgttattttaccagctatttattgagtgtcttttatgtaggctaaatgaacataggtctctggcctcacggagctcccagtcctaatcacattcaaggtcaccaggtacagttgtacaggttgtacactgcaggagagtgcctggcaaaaagatcaaatggggctgggacttctcattggccaacctgcctttccccagaaggagtgatttttctatcggcacaaaagcactatatggactggtaatggttacaggttcagagattacccagtgaggccttattcctcccttccccccaaaactgacacctttgttagccacctccccacccacatacatttctgccagtgttcacaatgacactcagcggtcatgtctggacatgagtgcccagggaatatgcccaagctatgccttgtcctcttgtcctgtttgcatttcactgggagcttgcactatgcagctccagtttcctgcagtgatcagggtcctgcaagcagtggggaagggggccaaggtattggaggactccctcccagctttggaagcctcatccgcgtgtgtgtgtgtgtgtatgtgtagacaagctctcgctctgtcacccaggctggagtgcagtggtgcaatcatggttcactgcagtcttgaccttttgggctcaagtgatcctcccacctcagcctcctgagtagctgggaccataggctcacaacaccacacctggcaaatttgattttttttttttttccagagacggggtctcgcaacattgcccagacttcctttgtgttagttaataaagctttctcaactgcctcagccttgtgtgagttgaggggaggtgtcacatccagctggagtcctttctaagcagccacagcctgatcctcccacttcctcccccaagaaaacattgtgggttgatggccataccctgaggttctggtccaaatcggactttctatgaccttctgggtctctagtgaaaactaaagactcctctccagaaaaaaacatttggtttctaatgaggcctggaatcttattcttgacctggggagcggaatccctttttgcagtactcccgggccctctgttggggcctccccttcctctccagggtggagtcgaggaggcggggctgcgggcctccttatctctagagccggccctggctctctggcgcggggccccttagtccgggctttttgccatggggtctctgttccctctgtcgctgctgttttttttggcggccgcctacccgggagttgggagcgcgctgggacgccggactaagcgggcgcaaagccccaagggtagccctctcgcgccctccgggacctcagtgcccttctgggtgcgcatgagcccggagttcgtggctgtgcagccggggaagtcagtgcagctcaattgcagcaacagctgtccccagccgcagaattccagcctccgcaccccgctgcggcaaggcaagacgctcagagggccgggttgggtgtcttaccagctgctcgacgtgagggcctggagctccctcgcgcactgcctcgtgacctgcgcaggaaaaacacgctgggccacctccaggatcaccgcctacagtgagggacaggggctcggtcccggctggggtgaggggagggggctggaagaggtgggggaagggtagttgacagtcgctctatagggagcgcccgcggacctcactcagaggctcccccttgccttagaaccgccccacagcgtgattttggagcctccggtcttaaagggcaggaaatacactttgcgctgccacgtgacgcaggtgttcccggtgggctacttggtggtgaccctgaggcatggaagccgggtcatctattccgaaagcctggagcgcttcaccggcctggatctggccaacgtgaccttgacctacgagtttgctgctggaccccgcgacttctggcagcccgtgatctgccacgcgcgcctcaatctcgacggcctggtggtccgcaacagctcggcacccattacactgatgctcggtgaggcacccctgtaaccctggggactaggaggaagggggcagagagagttatgaccccgagagggcgcacagaccaagcgtgagctccacgcgggtcgacagacctccctgtgttccgttcctaattctcgccttctgctcccagcttggagccccgcgcccacagctttggcctccggttccatcgctgcccttgtagggatcctcctcactgtgggcgctgcgtacctatgcaagtgcctagctatgaagtcccaggcgtaaagggggatgttctatgccggctgagcgagaaaaagaggaatatgaaacaatctggggaaatggccatacatggtggctgacgcctgtaatcccagcactttgggaggccgaggcaggagaatcgcttgagcccaggagttcgagaccagcctggacaacatagtgagaccccgtctatgcaaaaaatacacaaattagcctggtgtggtggcccgcacctgtggtcccagctacccgggaggctgagttgggaggatcctttgagccctgaaagtcgaggttgcagtgagccttgatcgtgccactgcactccagcctgggggacagagcacgaccctgtctccaaaaataaaataaaaataaaaataaatattggcgggggaaccctctggaatcaataaaggcttccttaaccagcctctgtcctgtgacctaagggtccgcattactgcccttcttcggaggaactggtttgtttttgttgttgttgttgtttttgcgatcactttctccaagttccttgtctccctgagggcacctgaggtttcctcactcagggcccacctggggtcccgaagccccagactctgtgtatccccagcgggtgtcacagaaacctctccttctgctggccttatcgagtgggatcagcgcgggccggggagagccacgggcaggggcggggtggggttcatggtatggctttcctgattggcgccgccgccaccacgcggcagctctgattggatgttaagtttcctatcccagccccaccttcagaccctgtgctttcctggaggccaaacaactgtggagcgagaactcatctccaaaataacttaccacgctggagtgagaccacgaatggtggggaggggagggtcccacggacatattgagggacgtggatacgcagaagaggtatccatgtggtggcagccgggaaggggtgatcagatggtccacagggaatatcacaaactcgaattctgacgatgttctggtagtcacccagccagatgagcgcatggagttgggggtggggggtgtcaaagcttggggcccggaagcggagtcaaaagcatcaccctcggtcccttgttctcgcgtggatgtcagggcccccacccaccgagcagaaggcggactcaggggcgctccagggtggctcgagctcacacacgctgagtagacacgtgcccgctgcaccctgggtaaatacagacccggagccgagcggattctaatttagacgcccgcgaacgctgcgcgcacgcacacgtgtcctcggctcgctggcactttcgtcccgccccctccgtcgcgtgcgggagctgacccggaggggtgcttagaggtatggctccgcggggtcaaaaggagaaggatcagtgagagaggcatccccacaccctcccctagaactgtcctttccccatccagtgcctcccaaatctctcttagtccccaaatgtatccccgccctaaggggcgctggtgggaggagctaaatgtgggggcggggctcggagtccagcttattatcatggcatctcagccagggctggggtaggggtttgggaagggcaacccagcatcccccgatcccagagtcgcggccggggatgacgcgagagagcgtggtcgcccccagaaggccctgggccatcatgccggcctccacgtagaccccaggggtcgctcactcctgccagctcgccttcaccaaggccaggagcttagcgcacgctcgcctcccgcccccccgccgcctctgccgccgccccctccttggaaaccaagttaccaacgttaaaccaatccccaagcgcaactctgcctcccccacaccccacccgccgcgccgcgcggagccgtcctctagcccagctcctcggctcgcgctctcctcgcctcctgtgctttccccgccgcggcgatgccagggccttcgccagggctgcgccgggcgctactcggcctctgggctgctctgggcctggggctcttcggcctctcaggtaagagccccgctctggttcggggtggacagggcgggggcggagtccctggacctgagaaacggcctcctgtccctcccagctctgccctcgcctcgctcccacgcctctgcccccacctcgagcctgagtcttctccccttccccctcctccccaacacacacccgagccccagcttcctgactcctcgatagcccctacccgcttcgagatcctaggtgttcttccgcacccaacccttcgccctggagacccagtgtctctcctgtccgctccccgggtacctccttacgctgtgctgtgcaccatggtccacggactggcatcttccccactcgcggtccgcgaagactccatctctccaactaccctgactcagaggcgctgttcccgctccacccagagccctggcaaccgggtccctcagctgttcccgcggttccttccatgagcccagccttgcgtcccggctccgtgttcttcaccgggtgtagggtccttcctgatccttgacccagcctcgtctctcctttgcccttgccgcaaacgcactctcctcgtatcccggcattctgccaggaccctgagaactggttcatcccccatcccccatcccgggtccccttctctcagccttgctgtgttcatccaagaacccacctttcctctcctctacgccctccccccatgctttcccgccgctccatcggcgctttggagaccatggctctctgctaccacgtcccagagacaccctcgaggtttagactctgggagtgcgcctttaaaccggaggcctgggcaggacgcgggacgcctgggttctttccctggctgcagcctctcctcctcctccccgccctctgagaacccttgactcgacataggggcgctaagatgtcagggagttggctccccaggctcagcccgcgtttccctgggcagcggtctcgcaggagcccttctgggcggacctgcagcctcgcgtggcgttcgtggagcgcgggggctcgctgtggctgaattgcagcaccaactgccctcggccggagcgcggtggcctggagacctcgctgcgccgaaacgggacccagaggggtttgcgttggttggcgcggcagctggtggacattcgcgagccggagactcagcccgtctgcttcttccgctgcgcgcggcgcacactacaggcgcgtgggctcattcgcactttccgtgagttctgggtggccacgcgcgtactccactactctccctccctcccaggccccgccccctgggtcccagggtcctccccttcaggccccaccttctgttccaagtcccggtgttcaaagagctgcggactcttcccccttgcagagcgaccagatcgcgtagagctgatgccgctgcctccctggcagccggtgggcgagaacttcaccctgagctgtagggtccccggcgccgggccccgtgcgagcctcacgctgaccctgctgcggggcgcccaggagctgatccgccgcagcttcgccggtgaaccaccccgagcgcggggcgcggtgctcacagccacggtactggctcggagggaggaccatggagccaatttctcgtgtcgcgccgagctggacctgcggccgcacggactgggactgtttgaaaacagctcggcccccagagagctccgaaccttctgtgagtgggtgtggggaggagatggggacccagtggggtcggtcggtgtttaggaggtttagaggtagatacatctgaatgctgaccccgacttcaaccctcgccggctgagctgtttccccctccgtgccttgaggatgataatacgataagatagtgcatgtcaagtgcttaggacatattgagcgctcggagttagttcaaacttggttcttcgacccctagccctgtctccggatgccccgcgcctcgctgctccccggctcttggaagttggctcggaaaggcccgtgagctgcactctggacggactgtttccagcctcagaggccagggtctacctcgcactgggggaccagaatctgagtcctgatgtcaccctcgaaggggacgcattcgtggccactgccacagccacagctagcgcagagcaggagggtgccaggcagctggtctgcaacgtcaccctggggggcgaaaaccgggagacccgggagaacgtgaccatctacagtaaggaaggaggcggggtctccgcggctccgaggtgggaccagaggaatgcgaaggcggggcgaagagtgggcgggacctcagtaccggaacaggcgtggcccgaggggcggggcaggtgggggcggagacgtaatcgctggggaggaggagcctgtacagcctgagaggcggggcgccgtaccctagttcgttctcagcaccccgaggattcgggcagataaggggcgggccttgaccggagggaggggtatggtcagtatactacgaccaaatgctccgcccccaggcttcccggcaccactcctgaccctgagcgaacccagcgtctccgaggggcagatggtgacagtaacctgcgcagctggggcccaagctctggtcacactggagggagttccagccgcggtcccggggcagcccgcccagcttcagctaaatgccaccgagaacgacgacagacgcagcttcttctgcgacgccaccctcgatgtggacggggagaccctgatcaagaacaggagcgcagagcttcgtgtcctatgtgagttggtgataacccctcgccccccaccttctggtgacttccaaggacccgcctgctccctcaccgtgtcgtggaggcggagccatttcttacgtctaagcctctgtaaccccacgccctgcccgcagacgctccccggctagacgattcggactgccccaggagttggacgtggcccgagggcccagagcagacgctgcgctgcgaggcccgcgggaacccagaaccctcagtgcactgtgcgcgctccgacggcggggccgtgctggctctgggcctgctgggtccagtcactcgggcgctctcaggcacttaccgctgcaaggcggccaatgatcaaggcgaggcggtcaaggacgtaacgctaacggtggagtgtgagtgggggtgcgcagggtgcatttctatctggttcaaggtctggagggtggccagcctccagggaagagtaggagtagggtatgaggtgtccctttgggtgaggttttgggaaagggaagaggctggttagtggggttggagaaagatcttggaggatggaagggaccgggtgggcgtgcccctagcctagggcgtggtatttgggcggagtcgtggaaaggcgggcagtccagagtgtttaagtttttagacgaaaaaggcgccactggtggctcaggaagctcccagacagagtgcatgcctcgactagcgtgacacctccttggatcggcgtccaagggttatgcagggacaacacttcgtggaagccttgccgcgccaaggagggtctagggacgtcagatttgcccccaaaccccaaagccaacaatacactccctcctccagacgcaccagcgctggacagcgtgggctgcccagaacgcattacttggctggagggaacagaagcctcgctgagctgtgtggcgcacggggtaccgccgcctgatgtgatctgcgtgcgctctggagaactcggggccgtcatcgaggggctgttgcgtgtggcccgggagcatgcgggcacttaccgctgcgaagccaccaaccctcggggctctgcggccaaaaatgtggccgtcacggtggaatgtgagtaggggcaccgcggagttaggcaggatctgtgggacaaccccggctggacttcctggcccccgtgtgagcccctgcaatcctgtttcccagatggccccaggtttgaggagccgagctgccccagcaattggacatgggtggaaggatctgggcgcctgttttcctgtgaggtcgatgggaagccacagccaagcgtgaagtgcgtgggctccgggggcgccactgagggggtgctgctgccgctggcacccccagaccctagtcccagagctcccagaatccctagagtcctggcacccggtatctacgtctgcaacgccaccaaccgccacggctccgtggccaaaacagtcgtcgtgagcgcggagtgtgagcgaggcccaggcgggtagggagcaggggtgccccacggtccaggcactccctgacatcccccatggctgctttgcagcgccaccggagatggatgaatctacctgcccaagtcaccagacgtggctggaaggggctgaggcttccgcgctggcctgcgccgcccggggtcgcccttccccaggagtgcgctgctctcgggaaggcatcccatggcctgagcagcagcgcgtgtcccgagaggacgcgggcacttaccactgtgtggccaccaatgcgcatggcacggactcccggaccgtcactgtgggcgtggaatgtgagtgggggcagcaccggatggaggggacacggtcctcggaagaatgactcgcagcggtgggagcattcaagggcacctctcccaatcccattctcggggacagggaattccagcctaaaccagggggtaatgaaaattctagccaggcgcagtggctcaggtctgtaatcccaacactttggaaggttgaggcggatgaatcacttgaggccaggagttcgagaccagcccggccaacatggcgaaaacccgtctctacaaaaattagccggtcgtggtggtgggcgcctgtggtcccagctacttgggaggctgaggcaggagaatcgcttgagcctgggaggcagaggttgcagggagccgagatcccgccactgcactccagcctgggcaacagagtgagactctttcttagaaaaacagaaaaagaaaattatagggaataggagcacggccctcctcaaatcctggattagaacactgacctgggcttcacctccttccattcggtgaagaagggcgaggaattttagccgcaacagcagcctgattgtcggggaaggaggctctgataggaggcaggatcctcttctgcccatcagaggcgcggtggtctcccatcgatcgttgtgggccggagcagggcatttgatcagtggctgggccggcgctaagccccacttcaccttctgtgcccttcagaccggccagtggtggccgaacttgctgcctcgccccctggaggcgtgcgcccaggaggaaacttcacgttgacctgccgcgcggaggcctggcctccagcccagatcagctggcgcgcgcccccgggggccctcaacatcggcctgtcgagcaacaacagcacactgagcgtggcaggcgccatgggaagccacggcggcgagtacgagtgcgcagccaccaacgcgcacgggcgccacgcgcggcgcatcacggtgcgcgtggccggtaagtggcagctggggagaggcggggcgaggtatctgagagggggcgtgacctgggtcttggggcggccggccccgcctgcctccctctcggtcccggtagactagacggaagtgggacagagtagaagtcaaaggtgccttagcgggtggggctgttgatcgcactttgaggggtgggagatggaggtggcagggggactgaattcaaggggagggaccctccggggctgtcactgctgcaggaaaggactttaaaacttgggctggattctgcgtggtggaaacttgacccaattcacaatccactgtggggaagattggggagggaccaaagtcattggatgttggagggagagaggggtcaagatcgccttctctcacttcctgaagctcctggggctgggttctctctggggtcgggggaacctgacctggtcctgccggtcctcattttttgggggatggggagagttgacttgtcgccagggggctaagtgtggtcacgggtttatatccccatgggctgaagtgcgatataaatcgggactcgggtcgccctggcactgggagtggccttattgcatgggttgtctcccttctcccaaggccagacagtgagctccccggggcatgaggactgacttcgtgcctgtgggagtgcggggggcggtgggagaagccccccggagcttggccaccctccgcgagggtctccaccccgcaggtccgtggctatgggtcgccgtgggcggcgcggcggggggcgcggcgctgctggccgcgggggccggcctggccttctacgtgcagtccaccgcctgcaagaagggcgagtacaacgtgcaggaggccgagagctcaggcgaggccgtgtgtctgaacggagcgggcggcggcgctggcggggcggcaggcgcggagggcggacccgaggcggcggggggcgcggccgagtcgccggcggagggcgaggtcttcgccatacagctgacatcggcgtgagcccgctcccctctccccgcgggccgggggacgccccccagactcacacgggggcttatttattgctttatttatttacttattcatttatttatgtattcaactccaagggcgtcacccccattttctacccatcccctcaataaagtttttataaaggaactccctgtctccgcttctgtttctgcaaggtggaacaagcccagggttccagtcgtgacctcccgagttattcattcaaaaagcgatttttgagagggcctggggtggtggcttaggcctgtaatcccaggacttgtgggaggcccaggtgggaggatcccttgcacccaagagtttcagaccagcctgggcaacatagggagaccctacaaaaaatatttttcaaaaattagccaaggccggtcgcggtggctcatgcgtgtaatcccaggactttggaaggccgaggcggccagatcacgaggtcgaggtcatgagatcgagaccatcctggccaatatggtgaaaccctgtctctactaaaaatacaaaaattagctgggcatggtggtgcgcgcctgtagtcccagctattcgggaggctgaggcaggagaatcgctttaaccccggaggcagaggttgcagtgagccgagatcgtgccactgaactccagcctggcgacagagcgagattccgtcttaaaaaaaaaaccaggcgtggtggctcacgcctgtaatcccagcactttgggaggccgaggcgggcggatcacgaggtcgggagatcgagaccatcctcgctaacacggtgaaaccccgtctctactaaaaatacaaaaaaaaaaaaaaaaaaaaaattagccgagcgtggtggcgggcgcctgtagtcccagctactcaggaggctgaggcaggagaatggcatgaacccggggagcagagcttgcagtgagccgagatcgcgccactgcactccaccctggcagacagcaagactccgtctcaaaaaaaaaaaaaaaaattagccagggccgagcacagtactctcgcttgaatcccagaactttgggaaactaaggcggggggggggggtcacttgaggtcaggagttcgagaccaccctggccaacgtggtgaaacaccttctctaccaaaaatacaaaaaaattaaggccgggtgaagtggctcacgtctgtaatcccagcactttgcgaggctgaggcgggcggatcatggggttagaagatcaagactgtcctggctaacatggtgaaaccccgtcactactaaaaacacaaaaattagccgggcgtggtggcacatgcctgtagtcccagctactcaagaggctgaggcaggagaatcgctttaaccccggaggcagaggttgcagtgagccaagatcgcaccactgcactccagcctgggcaatagagcgagactctgtctcaaaaaaaaaccaaaaacaaaaacaaaaaaatacaaaaatttagctgggctgtagtggcacacgccctgtaatcccagctactcgtgaggctgaggcaggagaattgctagaacccgggaggtagagatcttgccattgcactccagcctgggcaacagaactagactctgtctcaaaaaaaaaaaaaaaaaaaaaaaagtgttttttgagggggctgggcatggtggctcaagcctgtaatcccaggacttttgggaggcccaggtgggaggatcccttgtgcccacgagtttcagaccagcctgggcaacatagcgagaccctacaaaaaaacatgtttcaaaaaaaaatttttttttttgagatggagtctcgctctgtcgcccaggctggacagcagtggcactatctctgctcactgcaagctccgtctcccgggttcatgccattctcctgcctcagcctcccaagtagctgggattacaggcgcctgccaccacacccagctaatttttttttgtatttttagtagagatgggatttcaccgtgttcgccaggatggtctctattcctgacctcgagatccacccgcctcagcctcccaaagtgctgggattacaggcgtgagccaccgcgcccggcctcaaaaaaaaaattttttttttgagatggagtcttgctctgtcacccaggctggagtgctgtggtgtgatcttggctcactgcaacctctgcctcctgggttcaagcaattcccctgccttggcttcccaaatagctgggactataggcatgcaccaccacacccagctaatttttgtatttttagtagagacagggtttcaccatgttggccaggctggtctcgaactcctgacctaaggtgatccacctgcctcggtctcccaaagtgctgggattacagctgtaagccaccatgcctggtgtatttttcaaaaattagccagacatggtggtgcatgcctgtagtcccagctacttgggaggctgaggcaggaggatcctttgagcctaggaggtcaaagccacttccagctatgatatcgtcattgtgctccagcccaggtgacagaaccagaccctgtctctaaaaacaaacaacgaaaaaatccaaaaactttttttgaacacctactatgcatcaggcacaatctaagctgtctttttctttttcttttttttttttttttgagacggagtctctctgtcgcccaggctggagtgcagtggtgtaatctcagctcactgcaagctctgcctcccacgttcaagcgattttcctgcctcagcctcctgagtagctgggattacaggcgcgcgccaccactacgcccggctaatttttgtatttttagtagagacagggtttcaccatgttggtcaggctagtctggaactactgacctcgtgattcacctgcctcggtctcccaacgtgctggaattacaagcctgagccactgtgcctggcccggctggctgtcttttctcagtgtgacctagagctcgtcctctctcagtgcctgttttctgctctcttcacacccttgggcaggggtgggggcctcactccttcctcctacttatctcttccacccagcactgccctctgatccgggtcactcttggaggtgggggctaggtgcttcccccaggcctggttaccggcagagctgaggccgccttgccagggtgggtggaggccctctccgttgtgcccctgccctgagacttcggtgagaccttcctgggcaggcactggctgatgctatgggtgtcagcccttagcatgtcctccctgttaaagggggcacccctgccccgccctcaatgcctcctttgtcctgtgtccacccacagtgcttcagtttacccccaccctgcctttccactcagcccatcatgattcagaacagacacacacagggtatccgctgcaacccccactacacggcaccttcccccctcatccccaacagcataaggcacagcagctgggcctcctccccacagcctcctcctctgcccctcctccctcaaaagcaggaacacggagccctagagaaggaagccagtcccatgcaaacatgtaatgagcaaagatgagacggggaaatggcacaagagggcaggccagtgctcggtgctggagccaggggccaggtataacacccaaaaaggcaccagccaggtgcagtccctgccactaacagcacctcaccttttctgcctgtgccctccctacttaatgatctctctccgctcctactgacctcaaggtctctttcagagccttcagatgagatatttattttagtaggttggtgcaaaagtaattgctgtttttgccattgaaagtaatggcaggcagggcatggtggctcacgcctgtaatcccagcactttgggaggccgaggtgggcagatcacgaggtcaggagttcaagaccagcctggctaacatggtgaaaccctgtctctactaacaatacaaaaaaaattagccggacatggtggcacacccctgtagtctcagctacttgggaggctgaggcaggagaactgcttgaaccctgaagcggaggctgcagtgagctgaaatcacgccactgcactccagcctgggccacagagtgagactgtctcagaggaaaaaaaaaaaaaaaaagtaatggcaaaaactgcaattactttttctttttctttctgtttttttttttgtttgtttgtttgtttgtttgtttgtttgagacggagtctcactgtgtggcccaggctggagtgcagtggcgcaatcttggcttactgcagcctccgcctcccaggttcaagtgattctctcctgcctcagcctcccaataggattacaggcacccaccactatgcctggctaatttttgtatctttagcagagatggggtttcaccatgtttgccaggctggtctcgaactcctgatccacccacctcagcttcccaaagtgctgggattacaggcaggcatgagccatggtgcccgacatttttttttttttttctttttttttttgagacagagtctcactttgtcacccaggctggagtgcaaaggcaagatctcactgcagcctctgcctcctgggttaaagcgattctcccaccttagccccctgagtaggtgagattacaggcacatgccaccacacctgcctaatttttgtatttttaatagagagggggtttcaccattttgtccacgctggtctcgaactcctgacctcaagggattcgcccacctcagcctcccaaagtgctgggattacaggcatgagccaccacgcccgacctccttaactcttttatttccttgcacactttttctctgtagcccagctcacaacttaacatcctcttagacatacacctgaggttttttttttttttttttttgagagggagtctctctctgtcacccaggatggaatgcagtggtgtgctctcagctcactgcaaccttgcaaccactgcctcccaggttcaagcaattctcctgcctcagcctcccgagtagctgggactacagacacatgccgccacacctggctgattttttgttttttagtagagacagggtttcaccgtgttgcccaggctggtctcaaactcctgagttcaggcagtccgcctgccttagccttccaaaatgctgggattacaggcatgaggcaccgcgtcctgcctctgagttttttttttttttttttttttactgtctcctagaacatcagccccagtagagcagggatctttgttctgttcaccactgagggtcctcattgggtcctagcacacacagttgctcaataaatgttgaataagtgggtaaagacagccacgagcttgcagatatgtgttcaaggtgtgtccttgcagagagcttctctatacttggcactggagaggcctgtcgtgggcaaggacatagatgtggcgacctcagacttgagaactcctggggcagtaggggagatggatgtggataatgtaaccataagccttcctttctattttagactgagtggtcaaggaaggcttccagacaatggaaattctgataggttctaagagggagaccagcaaggagctgaaccggaggctgacacagggtgagagtgggaatgtctattttattttttttttggagacagggtctcactctgttgctcaggcagcagtgcagtggcacgatcgtggctcactgcagcttcaacttcccagactcaagtgatcctcccacctcagcctcccaagcagctgggaatataggtgcatgccaccacatccggctaatttttgtatttttggtagaaacggggtttcaccatgttgcccaggctggtcttgaactcctgggttcaagtgatcttgctgccttgggctcccaaagtgcttggattacaggtgtgagcctgtgagccacatctggcctattttattttttaattagttttttgtttttgtttttgttttgagatggagtctctgtctccaaggctggagtgcagtggcacgatctcggctcactgtaacctccacctcccaagtagctgggattacaggcacatgccaccacgcctggctaatttttgtatctttagtagagacagggtttccccatgttggccaggctggtctcgaactcctgacctccggtgatccacctgcctcagtttcccaaagtgctgggattataggaatgagccactctgcctggctgggcatgtgtcttgtttttttcattctgtagataacaagcaattgtcctccctcagcctcccaagtagctggtactacaggcgcctgccactacgcccggctattttttgtagttttagcagaggtggggtttcaccatgttaaccagtctctaactcctgacctcaggtgatcctcctgccttggcctcccaaagtgctggaattacaggtgtgagccaccaagcccagcctcaaactcctgagtttaagtgatcctcacacctcagcctccctgagtgctgggattacaggtgtgagccaccacacccggcctgagtcgggggaggtgtctattttagtctgagtggtcaaggaaggcttctctgaagagctgatgttggggccaggcctcctcaagcgattagaaggtgtcagccatggggagatgtggagggagggtgtttcaggccaaggaagggtaagatcaaataattcagggatctgagggcagaggaatctggactccagttctcccattcagggctgcccaggagagacaaagaggatctcataagggtgtgtggctttgtggctcactcacgcccacagcaaggaccatgcccaccctacttttttttttttccccaagtctccctctattacccaggctggagtacagtggtacgatcacggttcactgcagtcttgacctccagggctcaagtgatcctcccacctcagtgtcctgagtagctggcactacaggcatgcaccaccacccctggctcattttttgattttttggtagagacggggtctcactgtgttacccaggctggtctcaaactcctgggctcaagcgatcctcccacctctgccttctgaagtgttgggattacaggtgtgagccaccatgcccagcccgccaccagtcttgactctccatcctccctccctccctgtgagtgctggtggcctgtgtgtcccgcctgctgaaagatgcctctgacttggggcttttgacttcaggcccgggagacacattttggctggattagggagatcttaaaagggggtaggggacacagcaggggctaaggagagtgacacactgcaggcaggggttgggtgacagatgaaggatccactggtatatgctgccagtgtgtgccatctacttgtgtgttttacgtgtgtctggtgcatgtgtcctgtgtgggctgtatctgtgtgtgactcagctacgtgtcagcatatccctgtcgacgtgtgtctctgctgatgtgtctgtcagcacgcacggctgtcttgcatgtgtcttttttgagatagagtctcgctctgtcacccaggctggagtgcagtggcacgatcttggctcattgcaacctcaacctcccaggttcaagcgattctcctgcctgagcctcccaagtagctcggattacaggcacatgctaccacgcctggctaatttttgcatatttagtagagacggggtttcatcatgttggccaggctggtctcgatctcctgacctcaggtgatccacctgcatcagcctcccaaagtgctgggattacagaaatgagccactgtgcctggctagacatgtgtctttttttttcccttctgtatataacagggtctcactatgttgcccaggctggtctcaaactcgtggcctcaagcaatcctcctgcctcagcctcccaaagtgttgggattacaggcgtgagccactgcacccggcttgtgtgtgtctttctgtatctgttgtgtgtgtctgtgggtagtggctgtttccctgcatgggacattgtggtaaatgtggctaattccctgtgtgggggctgctgcctgtggataagactgtgtctctgtgcatgcgcacgtgtgtgcacgcccctcacaaccccaacgagaaaacacctgtccaccttcctgggctggcacaggggcacaggaggcgggatcccaaatcacaggctttttctctcggcatatctctgtactttattgtccctgctgtaacaatgctcatccttcctgagagcgtctcctgagggggcctcggccaaggctgactggagaaggggctggtgacccctagcaggctctgccacctgaggcctgggtcttcccccgggatccttgaatctggagatggcagagaggaggcaggccggctctttccccaatcctcctaggagagctgcttctgcccattctcccactggtgaaacggaggcagaagcagcagctcagcagggtgaagctgggtttaaccttcctgaatggggtccagggacactccacatctgccacatagcctcttgggctggacatttttcctgggcaccagccagcagctggagcagcgagtgccgtatttcttgtacctagggttgggggacaagaaactgccatttaggatgcagtgggggcccggaaaccgccacaaggaaaccacttttcccaagaggtaggtgttttgctttttgctttccccacaggccatcctggttacacgtggactgatttggggacccccgccccaactccctcctccattctaaggacctgatcccacaggcgttgcagagaggggtcccatcttcagcgtctctccagagcggggtcctctgggtccgacaggaagcacagcgccggggctctgaagggtcagaggtcaaagggcaggggtcagaggccaagcatgtgagctcgggatgcctgtgcggagtcgggcattttgtgggggtctcagtaaaggccccacctagctctggatcagccctgggagttgccagctctaagccacagcaaagccaggaagggagacagatggcagcattccgcagaggaggaagctgggggtgggggtgactcagcccaagtggaggggggtgctgcgactcctccctgagggctctaaatggggaagcaagatggagaaggggggggcagggagaaaggcagggaagacaggaaattggcccccaaaatatttatagctcttgggttttcaggactcacccagggcctcgctgcctgctgagtgggcctcggtgcctcctgggtgggctgcagggcccccaacagcatctgcaggggattcctgagaacggctactgcagggcaggctgtggggcagacaaggtattagcactgggggggatctgtagcttgtccccaacagccctccgaaatgaagatttagtatcaaggtatcagccatcccccgaggaggcaactaatatctgaatggcctggctttgcctctcattagtaatattattattattattattattatttttgcagatggagtctcgctctgttgcccaggctggagtgtagtggtgtcatctcagctcactacaacctccacctcccgggttcaagcaattcttgagcctcagcctcccaagcagctgggactacaggcgcgcgacaccacgcccagctaatttttgtatttttagtacagacggggtttcaccatgttggccaggctggtctcgaactcctgacctcaagtgatccacccacctcggcctcccaaagtgcagggattacaggcatgagctaccgtgcccgacctaattattattattattatttgaaaaatagtaagcacagggacagcctgccaggttccaatcccagttctccatgtccttgctgtgtgagcctggacacattatctcctactctgtgcctcagtttcctcatctgtaaaatgggcttcccaatacaacagtttttttttctttgaaaatttgatttattgatttttaaaaagagatgggagtctgggcaatatagggagaccccgtctctacaaacaaaaaaaatagccaggagtggtggtacaggcctgcactcccagctagttgggaggctgaggagggaggatggcttgggcctgggaggtccaggctgcagtgagccatgattgcgccactgcactccaccctgggtgacagagcaagaccctgtctcaaaaacaaacaaacaaacaaaagcaaaaaaaagcagccaggcatggtggcggctcactcctgtaatcccaacactttgggagggcaaggcagatggatcacctgaggtcaagagatcgagaccatcccggccaacatggcaaaaccccatctctactaaaaatacaaaaattagccaggcgtggtagcaggcacctgtaatcccagctactccagaggctgaggcaggagaatcgtttgaatccgggaggcagaggttgcagtgagccgagattgtgtcattgcactccagcctgaacgacagagtgcaactccatctcaaaaaaaaaaaaaaatattgttttggcggcatgattaaaaaagtcataattataatttttataataacaataaataggtaaaaattagagctgggggtcatactatgttgcccaggctggtcttgaactcctgggctcatgcaatcctcccaccttggcctcccaaagtgctgggattacaggtgtgagccaccaggcccagcttcccaaagcttttttttttttttttttaaggggatggagtcttgctctgtcacccaggctggagtgcagtggtgccatctctgctcagtgcaacctccacctcctgggttcaagcgattctcctgcctcagcctcccaagtagctgggattacaggtgcccattaccattcccagctagttttttttttttttttgagactgagtcccactctgtggctcaggctggagtgaggtggcgctatctctgcttactgaagacttcacctcctgagttcaagcgattctcctgcctcagcctcctgagcagctgggattacaggcacccactacaacgcccagctaattttttgtatttttagtagacatggggtttcactatgttggccaggctgatctcaaactcctgacttcaggtgatctgctcgccttggcctcccaaagtgatgggattataggcgtgagccactgtgcccggcctccccaggcttttgaatgagcccatacacataaaatactgcctgttaacctcttattgttgtcactaccaacaaatagtagctgttagcattattgggaaaaatcaccgcagccgcagctgcagcctaagcaaggccaggcctgattcctaaagagaccaggtctcacattgggagtggggagccactgagtcaggagcggcaggactgtatctggcaccagctcaagttgtcaaccagagactgggccacgtgtaacgtagagcacaggtgagggtccacaccgacgccagagagcacccctacctcccacactggtgtttgcgttgtaactgggagaaagggcggcctggccccagccggcccctacctgtacgtggggatgatctgcaggctggagtccggctttatctgaaacttcagagtcaccccctcgaacccagggtccactctctcggtgccccggcaggggttcagctgtttccggggccttctctggggtggggccgagggagtccccgggggctgcagacggcggcccttttggctgatcctggtctgtgtgtccttggaatccctgtccagcagcaggcggccctgagtccccagagccatcgggtcccagcaaggccccaggaccggggtgtcctgggcaggggactgacccagcctctccactgtctcttggaggaagcacagggcggtgaccgactcctggcatgcaggccagagggacctggggagaagggcagtggggtcacgttttcttgggtgactcctgggtttagccggccagggggttccaacttgggccggctctttgtgtacccttggacaggctacacaccccacctgaggttcagtcatttctaactctgggtggaaggtttaagagttgcagtaattgcaactcacctcgcccactgtgggcctcccaggcacgcccagccctccacatcaatcaaccccttacggcacccgtagatcacccaggcagggaccgccctaggtgaccgaggcaggatatcaagcctctggctgcaggatcgagaaaaaggttactttttttctttgtgtttcttttagagaccgagcctcactctgtacccccgcctggagtgcaggggcgtgatcaggactcagtgcagcctagaactcctgggctcgaccgatccttccgcctcagcctcccgagtagctgggacttacaggcacgcgccaccacgccgctggcttgccataatatgattacgatttttatcattttcattattattgagttgccctccataacccctggatgatccctggggagtgcctacatcagccccagagacatggaattgcatggcctctgatccctagatgaccccaagtgtctctgggcaccagaacctctttgtaagtttcagtaactattataaaattgccacttctcgataaccccagcaaagagaggtcatgaccccttgatcactgagccaggtggtgaagtgctagcggggtccggggaatggggtttggccttacgcacctctcactgattctgcagcatcctggggtcctcggcttctcctgggagggggatcctcccagccgctccaggttcagacagggcggcgccagaagctttgctggcattgaggagtccgggattggctcggcctccattgcgccccagcccagccccctccctaatttcacccggccctgtcccgctgggcccacccgatgaaacccacctgggaggggcgggacctgtgtggtgggagcgctcttggtagaggatgcgatgagccccagctgagagcgaccagcctcggcggcacctttcctctttctggcttttttcaggtcatccgcgcacccctgcgtggcaagggcggcctggaccccaccaaatccctccgcagctgccggggcggggccttccacgctagccctccccctcggaaatgggggctcccaggcctctgccttggatccccagcggcatcttagatcccagagggaaaagagaaccgggggcccagcacagcagatgcaggtgtggtttgtttttgtttttgttttttttttttttgagacagggcctcactctgtcacccaggctggagtggaatggcctgatcaccgctccactgcagcctaaatcccctgggctcaagtgatcctcccacctcagtctcccgagtagctgggactacaggcacttaccaccactccacgctaatttttactgtttttatagagacgaggtctcgccatgttgcccaggatggtcttaagctcctggcctcaagtgatcctcccatcttggcttcccaaagtgctaggattacaggtgtgagccacctgtagaccccagatctgtcccccaaggacactcaacatgctggggcctgtgttatcgatttattgcagctccaatatgagtccactcctactcaaaccctgattctcaggggcctggggaaggccaccccactaggggccctgtccccaccagagcctggacatgggactctctcccaagcaggggtgttgtccttcacaggggcttccacgtctctcccgggcctgtccgcactctgggcagggctggcacctggctattccctcaatctgggccctggggccatggcaatgtggaatggtccaggtgttcatgtcagtggggcttggggacatggccatccacgtagaagttcctggtgatcttgggcagggtgaattccgctccttccagctccggtgtcagcacaatctggcagcccagccgcgagttctcctggaggaggggggccatgtctagcatgtcgtcttccctagggtggtgacacgggcagtgttagccgagggcaagctagctgggtgggtggggggccagaggtgggggagggaggaagctgactgagcgcagggggtagtggtgggggaggcagctcccattccaggaactggaagtggggaggatggtgggggctgctgaatgctccagggtgaagctgccagctagacagggctgacccactcacctctcctcgggaggaggcaggagatccaggtggtcttcactcacatacacatggcaggtggagcaggccagggaggcttcacaggcccctaggggtgggaagtgaagggggcgcaggtgagtggcagagtcaggaaggggctgctatgcgaatggcgtagaggagtagacctctcttccaccacgtgcctcacgtctccctcctgggcctgcagctccactgtgtgtaccaggcactgtgtcatgtcctcaatgtcctcagctagctgttccccagtgtgtagggtttacaaacggacatctgggaggccccatttcccagggactccctagcaggctgagatgcagaaccattaaggagcagggacttggctgccaggtagctgagaggggaaaggccaggcaggctccccgcagtctgtgagcccttgctgtgaccctatcactgtgctgggctaatgtgtccccacctctccactgctcttggaggatggaccggctgactcagcagtcagtgtggtgggggaaggaatcaggcattaggattttgttttttttttttttgagatggagtcttgttctgttgcccaggctggagtgcagtggcacgatctcggctcactgcaagctctgcctcccgggttcacgccattctcctgcctcagcctcccaagtagctgggactacaggtgcctgccaccacgcctggctaatttttttatatttttttagtagagctggggtttcaccatgttagccaggatggtcttgatctcctgacctcatgatctgcccgcctcagcttcccaaagtgctgggattacaggcgtaagccactgcacccggccaggattttttttttttttttttgagacagggtctcactctgttgcccagcctggagtgccatggctcagtcatagcttactgcctcaacctcccggctcaagcgatcctcccaccccagcctcccgagtagctgggactacatgtgcgcaccaccacacctggctaatttttttttttttttttttttgaggtggagtttcgctctctttgcccaggctggagtgcaatggtatgatctcggctcaatgcaacctctgcctcccaggttcaagtgattctcctgcctcagcctcccaagtagctgggattacaggtgcccaccatcacgcccagctaattttgtatttttagtagagatggggttttgccatgctggccaggctggtcttgaactcctgacctcaggtgatccacctatctcggcctccctaagtgctgggattacaggtgtgagccaccgcacctggccatattttttttttttttttttttttttgtagagacgaggttcaccatgtggcccaggctggtctcaaactcctaagctcaagcaatctgcctgccttggcttcccaaaatgctgggactacaggcatatgccactgcaccagaccaggaattagggttgaaagagacagaacctgaagttttctgctgaccacctgcccttggtcacacccccacatcctctgatcacagagaccggtgcttggggatcatgtccctcctggcctaaaactttccaaagggttttcacactcagaataaaatccaaactccttcacttagtcttgcagttcccccatccccctcattcattcctttgttttcctttgtaatttttttcttagagatggagtcccgctctgttgcccaggctggactgcagtggcgtgatctcggctcactacaagctccgcttcccggattcacgccattctcctgcctccgcctcccagagcagctgggactacaggcgcctgccaccatgcctggctaattttgtttttgtatttttagtagagacagggtttcaccatgttagccaggatggtcttgatctcctgacctcgtgatccgctcgcctcagcctcccaaagtgctgggattacaggcgtgagccaccacaccttgccaggccacttacctctactagcccggcacagtggctcatgtctgtaatcccagcactttgggaggccaaggcaggcagatcaactgtggtcaggagtttgagaccaccctggccaacatggcgaaaccccatctctattaaaaatacaaaaacttagccgggcatggtggcagttgcctgtaatcccagctactcgggaggctaaggcaggagaatcacttgaaccctggaggtagaggttgcagtaagccaagatcatgccattgcagtccagcctgggtgatagagcgagactctgtctcagataaataaatgaacaaataaatctatctcacattccaatccctgtcctagactattggctgctggattccagaacagaactttaggtaggcctttcataacccctcccaacatatcttcccctttaatgataaaatcaggatccctgatatattcatcccaaaagcaaaccctatatattttcttccagacaacccttcccaagttggtcataattatgtatttacctgtgggattattgtccctattagaccgaaatggatgtgagatgacagaggccttatttgttttgtatattgctgcctgacgcgcagtaggtattcatagaaaggcagcacagattagtggctacaatggactggtgagtctagtattgtcactcacttgcccttagaccaggtctacttaacctggggtttagttgcctcatctataatagggaataacagtctctactactcaagttgtcatgaagattcagtcagtgaatatttattaacatggttaaagacatatatatatatatatatatatttttttttttttttttttttttttttttttttgagacagtctcactctgtcgcccaggctggagtgcagtggcgtgatcttggctcactgcaagctccacctcccgggttcatgccattctcctgcctcagcctcccgagtagctgggactacaggcgcccaccaccacgcccacctaattttttgtatttttattagagacggggtttcaccattttagccaggatggtctctatctcctgacctcgtgatccgcccgcctcggcctcccaaagtgctgggattacaggcgtgagccaccgcgcctggccttttttttttgtttgtttgagacagagtcccgctctgtcatgcagcctggagtgcagtggtgccatcttggctcactgcaacctctgcctcccaagttcaagtgattcttgtgcctcagcctcccaagtagctgggattatatgcatgtgccaccacgcccagctaatttttgtgtttcttgtagagacagggtttcgccatgttggccagactagtctcaaactcctgtcctcaagtgagtcgcctgcctcggcctcccaaagtgttgggattacaggcatgagccactgtgcctggacaagaaatttctattattatttttctctcaacaaattatcaaacatctgttacatcttgacaggcaacagataagcatgaataaggacatgggtcaccaatctcactgggggacagatgacaaagtaggaaacaaaacagcctggcattgtggcttgtgcctataatcccagctacttgggaggctgaggtgggaggatcacttgaacccaggagttcaaggctgcagtgaggtatgattgcatcatggcactccagcattggcgacacagcaaggctccgtctcttgaaaaaaaaaaagtgagaagtgctatatatcatatcacactgataagacagagtaactagggcatgggtacttcagctgggctgaggggaatgggattgttagggacatgacatttacactgaggtctgaaggatgagaaagagccagaatgtttgctgggaaagcacttcagacagagggaacagcaaatgtaaaggccccgaagcaggaatgagcttggttgtttgaggaaccacaagaaagccagtgtgggctgggcgcggtggctcatgcctgtaatcccagcattttgggaggctgaggcgggtggatcacctttcaggagtttgagaccagcctggccaatgtggtgaaaccccgtctctactaaaaatacaaaaattagctgggcttggtggtgggcgcctgtaatcccagctagtctggaggctggggcaggagaaacgcttgaacccgggaggtggaggttgcagtgagctgaggtgcagtaagccattgcactccagcctgggcaacaagagtgaaactccatctcaaaacaacaacaacaaaaagaaagccaatgtggctagaatacagggaggaagggggaagagaacacaaaatcctgggagccaggagtcctagtgatctctaataaatgcttaacaaataagagcttggcaacagatgaggccatggtgaggggtttggattttagtccatatttggtgggaaaaagacgtgaagagacacacctaatttgtgggtttttttttttttttttttggacaaatgtataaggacctccttaattccctctgcccggttcctaccttccaggtccaccccgtggcgctgggccaggtgaagaacattgtccccgactctgccactcactgggatccgctggcctgagcggtctacgaacaccacgttcaccctggggacagatggaagtgcgaatgccgaactggatgatgggctcagggcccgggtagaatctagggttaggaagtaggaattgaggcttgacgcacaggtactgaatagggcaaagcagaagggggacctcgagatgaagctacagggcaagatggggaccagaggaattccgtgggatgaggaatgggggacttggccccctgcactcacacgtccccgggccgctccgggccgcccgcgtcctcctctccagccgggcgcgagcctggaaaacacggttcggtgagcggctgcgccgagccccgccccgccggcatctgacggattaacgctgcccgccccgggcgccccaggtacctgtcgcttgaaactttctggttgtccccagcgccaccccctcccccgacccggaagtgcccccaggtctgttccaccaggtgcccctggcagcctgcagtagaaccctggcactcacgcctccccgggccatggaggcggccatgacatgcatcacgtgactcaccgactgagcatgcgccgcgccagggaggcgagggaaagcccataatcaatggaacataagcgcagatgtttgcttagggcctgcggtgaccaggtgggaagagcagggcggaatccatctcaggtaaacccgcggggccatcccagacctcccactcaagcccactgtttgtcccaagaaccagccaactctgatttctttaaaaccatttacttacaaactttaattcagcaaaggtccgtgtggggagactggggtggggtcgggggaatagtccccttggagtggatgtggacccccagagtcaagggagggaagctggtggcccagttggctgggggcaaggcccagggtcacctcaggtcgacaggtcctgctggtgggcgggcccagagtttatcttcatggagtgctggtttctggcactgggctggaaggaggccagctccagggatctggccgggggtgggcaggcagaattcaagaattcatcttcaacaagcgagtgacagcagaggctccgggagatgggcacaatgtccgactcccacagacagacagcaggggactggcagagaaagcccatctctgcacggaggcccgggtaggagggggtggtggggccggttcgccaagatgaaggctttccccttctactgtccccagggtggagatcctgggtagggtggcccaatccctaggccagagctgtttggtccatagtcaagctcccagagcttggcatctgtggctctggccagcagggcctggggcccagcttttaaggcatcagaaggggagggggctgcggcagggaccccgggccccacggctggggtataggccagatgggcaggcaggggcaggagacagccatgcctgcagcaaatgtgggaaaaacagctgtttcaaaccgcaaggtgtggaatggtggcccggacaggccgggccttgaaggaatcagagctgggggctgtccggggtggtttgaaaaataaaacttagaaaaggaaacagaagtcagttgtcaaagttaaaaaaaaaggagacagtctctgtatcttcacgggaggtcagggaaacctccaaggcactcgaaaggccaaaattacaggagcaatgaggcaggagggctccggagagacgggcacagcggaggaggagatggggggagggagggagagcaggccggggcccctctctcttaaggctgcagggtttcagcgtggggagcaagccagagacataatgaggcctccagactcccccacaccccttgggctcctggggctccggctgattggtcagtaaagtctttcagagatttttctattaccgaaagagagaaaatggtttaaaaaaaacacaaaacaaaacatcagaaaacccaaaagcgatttggtgcaggcccttgagttatctctggtgccagccacttagaaaatcctcttccgcttcaggtaggagtccgcgtagtggccgccgaggccctgggagtgctggcccacatagctgccttctgggctgggctcgggcgagggcagcaggtgggcaaagctgcgtttctggccgcccagtggggtctggagacagagggcagggcggggcgggtcaggggccgctggggggccggggcttcccagccctgcatgtccccaccccctgcccgtaccttcagcaggtggctgtgaccattaggcccggggctgaggcccaggagcccttctccggaccccagcggggaagagccgattgcctgggagaaatggagaggtggaacaggtcactccctgggggccagaggaagcacccaccccgcccccctgccactgccccccagccctgagggaaagcgaacagtttcaggttcaaatcttgcttctgctactttctagctataagacctagggccaattgctccattttatttgagcctcggttttctcatctgtcagatggggccagtagcacccacagcctgggctgtagagagaggaagtgacagaaagcccggaatgctggcagtgctaggtgcttgatgcagagtggatggaggacaataggctgttgctactccaccctgagcaagaccaacccctgccaccaccccagctttggcctgggcaccgagggttacagagccccggtggcaggcacccccaaatcctagctgtcccagggggcctgtgcttggccagagaggttcctcaccttactgaggtggctctgcttgaggccagcctgcaggccgctggtgaagtaggaagtgggcgagcctgaatagaagtgagacagggggcccccgccactcccaccgctgctccgttcgccgaagccactgggcgggggggacatctgtagaagaagggccggtggagtgaagcagacaattgtagtacccagccctttgtatacaatcttccctctgcctcccaggttcaagcgattctcctgcctcagcctcccgagtagctgggattacaggcatgcgccaccatgcccagctaattttttgtatttttagtagagacggggtttctccatgttggtcagactggtctcacactcacgacctcaggtgatccgcccacctcggcctcccaaagtgctgggattacaggcgtgagccaccatgcccggcagttctgggctttgcaaagactagctttggctaataggactgaggagagctggcacgtgggtacccgcctcctcttcctcctccaggaacccagggatcatcaccgcacgaatgggcacacagaaactgttccagcctgtggacgccaaatatgtgaggccacatagctcactgagacccaggtgagtgccggggaccgcccactgccccatagagtggcaagaagtaatacaatgcctggcatggtatggtggctcatgcctgtgatcctagcactttgggaggccaaagtgggaggattgcttgagcccaggagtttgaggccacagtgagctatcatggagccactgcactccagcctgggcaacacagtgagatcctgtcttaaaaaaacccacaaagaacacacaaaatacaaggtctgctgttccaggctactaagtcatggcacagcctgtcatgtagtaaaagctgattgctacacatgccataccaggtggctcttaccttgtgtcggctgggtccgtgaggcccaagggctggttcccgtgggtgggagaagagccgccgaggtcccatgtcctgaatgaaagcgggagaagcacattgggttggagtctgtcccagcctcacccctggctgaactccatggcagagctgtcatcagggaagacagtccccaccactctgggaccaggaagaggcaaatttggggctggatgcagcttggcagggatggctgctgtgaaggggggtgccccccatgggcctaagtgtttggagtttcccaggcaagctgggaattcgagctgtgtggactcttgcagttttcctgtgttggcgttagttcctgttgttatttgtttgaaacacagagggggccaaacatcacccaggtgacctgtgggcggccagtttgcaatttctttcttttttttttttaaacggagttttgctcttgttgcccaggctggagtgtaatggcacaatcttggctcaccacaacctccgcctcccaggttcaagtgattctcctgcctcagcctccctagtaactgggattacaggcatgtctaccacacctggctaattttgtatttttagtataaaacataaattatattttatattatatatgaaatatatattttattatatattttataatatataatttctccatgttggtcaggctggtcttgaactcttgacctcaggtgatctgcccgcctcggcctcccaaagtgctgggattataggcatgagccaccgtgcctggcccagtttgcaatttctgacctgccaaggaggttggcatcatagaaggaccaaatctccaggggcacagacaggaatcaaaggtgggagagagggatagaaagggcaagccctgtctctggggagagacagtgtggcctaagtcctcttgggagagaaagacagacgcaggatgacagacagactgagacccaagatcctccagggctcgagaatggacagacaggcaggtggaccggaagcagggggtgatgtgcagacagacgggaaactttaagggcatgaggctgggcgcggtggctcttgcctgtaatcccagtactttgggaggctgaggcgggtggctcacttgaggtcaggagtttgagaccagcctggacaacacaatgagactccgtctctaccacaaatttaaaaattagctgggcatggaggtgcgtgcctgtggtcccagctcctcaggagactgaggtgtgaggatcgcttgagcccaagaggttgaggctgcagtgagctatgatcgcaccactgcactccagccagggcagcagagggagaccctgtctctaaaaaaaaaaaaaaaaaaaagcagagaccatatctggcacgttccctgccgcctccctagcacatggcctggcatagtcaatcctagagaaatatcagtttggagaatgatttggccttaggggacagagagctgcagccaggcactcaccgaggggtagtcgaagctgtagctgtcagacagtcctggttcggggggcaggcgggcgctgctgagggggctgagcaggcgggacttgagctggaaggctttgctgctgctgctgccacctccaggggctggggggttagttggggggccctcagctgggcggcggcttctcccggcgcctccccagccccgggcctccttacccgccaggttgctggccgggagcaggctgtgtaggttcaggtagggattcaggggaatccggtagtccttggggggctcccccagcagtgagacctgtggcgggaaggcaggattcgagagggcccccgggagagggaaccctgcggaacaggaggctggtgtggtgccgcgcgcagggcagggccttaccccagggggcgtcggcagaggcccactgtctttctggaggcctctgaggccagagcctcggagccccacaggggcggggggaggagtgagctgggccgctgggggacccaagcccagggcctcccggtcacccccagcagggccaagcacggatggcagcaggggtggtggcttccctcgccggggcggcagctccgggggcaggccccctcctagggagggaaggaggatttcaggggcccaggctcacaggacccctctccccagggccctccagctcccacctggaccagggcccaggggtcaagagacaaatccatgctggccactgagcagagctcatccctgggccctgagtggagggcacccaactgatggacaagggcgctgggacccagaggttgggtcactcacccgaggccacgtagcagggaaggaaggggaagtggctgggggacaccgtgtgggcagggtctgcgttacctgcaggcagctccccgaggagggggttggctggctgggccccaggctggagggcgcccaggggtgagtctcccaggatgccgggcttctagggacagagcacagacagttgcagatgggggcagggtggcccagggaagcagacaggtgtggcccagagtcttggcagacacaccccaactccagggcacggccgatcctgggcagacaggcacagggttccccagtgcccgccacactccaactctatcactgtcccatcagccatggtgaccgagggtctcctgagctccaggccccagttccctggccaatgattgcagcacagtatcaactgcagccacatggaatgggacagccacacagtgtttcagccacttttagtcacagaaggccagacccacaggctcacatattctgtcagttaccaccagacagacacacctgacttagaatccagggaaccacaccagacaggacggagcatgggtgtatgtctatgtgtgtgtgtgtctgtgtgtgtgtgtgcgtgtatatctgtgtctttgtttctgtgtgcatgagtctgtcttgtgtctatatgtgtgtctgtgtctatgtgtgtgtctttgtcttatgtctttgtgtgtctatgtctctgtgtgtatatttgcatctttgtatgtgtgagtctatatgtatacctgtgtttctaggtgtgcgtgtgtgtgtgtgcacacactgaggggatagacctggagttttttcccaggcatgtctatagagcttccgagcagagtctattcacaaactggtgcccagcagcggcgctcccagcccacacccagtttcaggctgtaaatgggcgtgtccaggtcccctgaccccaccccaggcaccaagtccaggggcgctctcagaatggagggaaagatggcgaaccatcatgagcaattgccagagggggatggggatgtgggtgggaaaggcaggggtttgggggagtcgccctcaccctggttctgcgcccccagggcacagccagaggtccccccaccccaccgatcgcaccagctgtgttgaaaagagcctgtaggggctgtagagcagtgggtgagggggatgcgtgtgttaccttctggccctgggtctgcagggcgagctgcaacagcgccgtggacagggctggcccattgagcagcggcatggctgggggggcacccaggaggcctggagggagacataggaggatgtgtgggggtccctgtgtcctccctgccccacctcacgaaacacagccctgaacccattgatggggcaggaaactgacactctggggccggggggtgggcagtggacttgcccaaaggaagggcctagaaggggcagaggctactccagtgaaggtcagccccctcttgtcagcaccccacctcactgcaggctgctgtgtggccctggtcccggcccccagttgtggacagcagcagcccccgctatgactccatactccccctcggccctactcctggggctcctgtcactgcagccaagatgagcagtttcgggaagtgccgggggcagcgctgcagcccctgttctgcacagtggggcccctgtccagccccaccttaccctgcttcccccccgcactgccatggagcagggggttgagcagcagctggagggacgcggatgggcccaggttgttgagcagctgcaggatgttgggctcggggaggagtcccttcccccgattgagggcctgcaggaaggaacagaagcagctcagagtgccgctggggccctgacatccccatggggctcccatccccaccccgccacctctgcccgcacaggctcaccgtggcctgggcagcgatgagagcggccagcatactgcggccggggggcccaggggcgcagaaggagactcgcaggtggctgccccccagggacaggccgtccgcctgctgctgtgcctcctccgccatctcagccgtctcatactccagcaccgcgaagcccttcagctgcccatcctggccgcacgccagctgccggaggaaggcaggcagtcatgagcatctgggcagcagtgactgcaccaccccgggaagtgacaaccgtaaccagactcagctgccccataagggtgaactccacgccaggcctccactgccctgtgcctcattcctgcatcagctcatctgattttcccaatgaccctgggaggctgcatcatacccatttctcagagaaggcaactgaggcacggagaggtcagcgcacccaaggccacacagctggagggagggcggagctgggagccacctcaccaacaaagccaaggccacgggcggatgcggtggctcacacctgtaatcccagcactttgggaggccgaggcgggcagataacctgaggtcgggagttcgagaccagcctgaccaacatggagaaaccccgtctctactaaaaatacaaaattagccaggcgtggtggcacatgcctgtattcccagctacttgggaggctgaggcagaggcaagagagtcacttgaacctgtgaggcagaggttgcggtgggccgagatcgcgccactgcactccagcctgggcaacaagagcaaaactccatctcaaaaaaaaaaaaaaaaaagagataatcagcaacgggtggggaaggaagggctctcgttccagacagtggccaagccaggtagcagtgctaagggaagtggttgggctgggcaccggcacttgctgaatgcccgggcagcaaaggtgcaggtagcagcccttcacctctgcccacgccctgtgccaaggtctgggcacagatctcccataaccaaacctgtcggcttttgttttgttttgttttttttgagacagagtcttgctctgtcaccccggagtgcagtgatgtgaacttagcttaccgtaacctccacctcctgggttcaagtgattctcctgcctcagcctcctggtagctgggattacaggtgtgcaccaccacgcccagctaatttttgtatttttagtagaaatgaggtttcaccatgtcggcaaggctggtcttgaactcctgacctcaagcgatccgcctgccttggcctcccaaagtgctggattacaggcgtgagccactgtgcccggccataaacacacccatcttagggatgaacagagagagactcagaggggtcacagagtgatcaaggccacacaattcctaagtcgagggactgatgtgtgaacctcaagctgcttcactgtcaagcccaccctccattcagctgggtcacctaacattaaaggtgggctcctcggaggacatcacttcaacgcctgctactcatcagatgctcaacaaatgtttggtgagaccaggcccagtggctcgaatctataatcccagctctttgggaggcaaaggcaggaggatcgtttgagcacaggagtttcagaccagcctgggcaacatagggagaccccatcttcacataattttttttttttttgagggagtctcgctctgttgcccaggctggagtgcggtggcatgatcttggctcactgcaacctccacctccctggttcaatcaattctcctgcctcagcttcccgagtagctgggattaaaggcacctaccaccacgcctggctaattttttttctatttttaatagagacagggtttttgttttttgttttgttttttttgagacggagtctcgctctgccacccagactggaatgcagtagtgggatcttggctcaccacaacctctgtctcccaggttcaggtgattcttctgcctcagcctcccaaatagctgggaccacaggcacatgccaccacacccagctaatttttttttttgtatttttaatggagatagggtttcaccatgttagccaggatggcctcgatctccagacctcgtgatgcacccacctcggcctcccaaagtgctgggattacaggcgtgagccaccgtgccatgagacagggttttaccatgttggccaggctggtttcgaactcctgacctcaagtgatctgcccgccgcagcctcccaaagtgctgggattacaggcatgagccactgtgcccggcctctacataaaattttaaaaatcagctgggcatggtgatgcattcctgtagttccccagctacatgggaggccaaggtaggaggatttcttgaacccaggaggtcgaggccggagtgtactcctccagcctgggtgattgagaacctgtctcaaaaaaaaaaaaaattaagtttagtgaatgttcgagtggaggaatgaatgggcagctgttcacaacaacctgatcatgaagcactgccagccccattttgagatgtggaaacaggctaggagagtacctgtagctggtcatgaccctgtgacctttgatctccacataagaaggtaaggccaggccagcgcagtggctcacacctgtaatctcagcacttggggaggccgaggcaggtgtatcacctgaagtcaggagttcaagaccagcctggccaacacggcgaaaccccatctctattaaaaacacaaaaattagctgggtgtggtgtcaggcgctgtcatcccagctactcgggaggctgaagctggagaatcacttgaacccaggaggcggaggatgcagtgagccaagatcgcgcccctgcactccagactgggtgacagagcaagactctgtcttaaaaaaatataaaataaaataaaagaaaggtgaggccattgtgctaactcatcttctgtcctgagcccgcacaggcggcctggtacatagcaggcctggtacgtagcaggtgtccaagagaaagcagcagaatggatgaatgataagtaaacagagagggggttcccgtggctcatggatactcagtttttgttttttttgtttctttgagacggagtctcgctctgtcgcccaggctggagtgcagcggcacgatctccactaaccgcaaccgcagtcttctgggttcaagcaattctcctgtctcagcctcctgagtagctgagattacaggcgcgtggcgccatgcctggctacctttttttttttgttgtatttttagtagagacgggatttctccatgtttgtcaggctggtctcaaactcctgacctcaggtgatccgtccgtctcggcctccaaagagctggcattacaagcgtgagccactgcgcctggcctgtttttttttttttttttttttctgtttttgagatgcagtgttgctttgtcacccaggctggagtacagtggcgtgatctcagctcactgcaacctccacctcccaggtacaagcgattctcctgcctcagcctcctgagtagctgggattacaggcctgcaccaccacacctggctaattttttttgtatttttagtagagacagggtttcaccatgttggccaggctggtcttgaactcttgacctcaagtgatccacctgcctcggcctctcaaagtgctgggattacatgcatgagccacctcacccagcctgtttcttgttttaaatatagagatggtgtcccactatcttgcccaggctagtcttgaactcctggtctcgagtgatcctcctgcctctgcctcccaacagacacctagtttaaatggggcaccaataccccacttacacgagagggacccactcaagcccacagagctgggggtccgagcccaggactgtctctctgtttttgagataagggtctagctctgttgctcaggctgtagtgtcatggtgctgtggtgcgatcatggctcactgcagcctcggactcccagaatcaggcaatcctcccacctcagcctcctgagtagctgggactacaggcacaccatcatacctatctaatttttgtatagagaggatttcaccatattgcccaggctggtctcgaactcctgggctcgagggatccgcccgcctcagcctcccaaagtgttagggttacaggtgtgagtcactgcacctggccaggcctaccccttttaagcctctgcactggcctccgctcactggcccaagctctggagctaggctgcggtgttctgatcccagctctgccagaccctggctgtttaactctaggcaagttacttgacccctctgtgccttggtatcctcacctgaaaatgggagtgatacctgcctctcagggttgctacaggatgaagcaactgaaggttacgtactcagagtccacagcgagtgctgggggaatgtcccctttgggatctctggggatcaagaccttctgggggctcttagagagtgagtctggcctgttctcgccccactgcacctgttacagggcgaggcacacacacagaagtgcctggcatgtgtggcttgaatgaacaagggactgttttgccaacccattgtgcaagtattgagtccctgcttatggaggagggaaactgcagatcagagagccagtgactggcccgagctcgagggcggggctgggatctggcaaagcctcagtctctgacctcaaggctcaaatagactgtgggctcctctgcagcctcctcaatgcctggtccaggtctgggaccccatgggaggtttgacgagggtaccagcgaatgaggaggtgagtggtgagcaagcctcgagatccatagttacaagagtggccttgcatgcatctgatagagggacagtgaggcctgaggctgcagagggattcaaatcccctggccaggtgtggtggctcacgcatgtaatcccagcactttgggaggatcacctgaggccaggagttcaagactatcctggccaacatggcaaaaccccatctctactaaaaatataaaaattatccaggcatgggggcggggcgcctataatcccagctactctggaggttaaggcaagagaattgcttgaaccaaagaggcggaggttgcagtgaactgagattgtatcactgcactccagcatgggtgacaaagtgagactgtctcaaaaaaaaaaaagaaaaggcagatgactccaaagactctctcaggtgctccgggcctggcacctgctccccaatgctctccacagggctcacctggcagaaggtggggctgtggacagctgacagcgcccggcacagagcgtccacatcgttgaagccaggtggcaggcggtccacacagaggcagcgggagtggagaagggcaggcgtcagttgcccggcatccgtccagtgcacgtagagggtgcgtggtcccagcggcttgcccagcaggtccgacttggcacgggcagccgagtccttcttcatgtactcagcaaagccatagcccttggattggccagtgcgctcactgtagaccaggaagcagcgctccaggctgccgaagggccgcaccagctcctcgaactgctgctgtgtgaggctggggggcaggttggccacacacagcagggcatccgtgggctgcagctgcaccgacagttcacgctcccgcaggcggctctggtggaaagcattgattgcggcctcggcctgctccccattcagcagggtcacgaaggctgcggtgggaggagggcagtgcgaggtcagccgggccctgagggcctgcccctccaccccgccaccctgcaaaccaggtgggacctccaaatgctgggcatctcaggtgcctgctgatctgagcagttgccagccttggcgactcacacaggcgagagcgcctgccattgactctaggctccacgaagcccactccctctcccagccctgcgtccacctgcacccacagcagcgctcaccaactgtgggcctggctctgtcctaagaacgctgtgggtcactcgggtgataccaagggcagtggttaagcccatgctcactggggcccagatttaagccccaagccccaggtggctttgggggtatcagtttcctcatctctcaaatggatataacttaatcatcacaatcaccattttgccagagaggaaacgggcccagagcagcacccctgtgccccgagtaggggagcctggacttgaacccaggcagccggactccagaggcccactctacacactgcccacccctgccacctttccaggccaccagtgcccctgaaccctgctgccacgtgctgccccagatttgcgatccacccagcggccgcaggaagctttgttcaaaacgatcacgccacatccatcttgtggcttctagctgcagggtgcagtgcagcctgtgcgggctcgctgacctcccctcccatctcaccgctgccacccggaccacgccaggcacactccagaggggcctttgcagctgctgtttcttgagcatggaacactgagccccacctcctcacctggttaacctggacccacccaggtagaaaccctgtctctactaaaaatacaaaaattagccgggcatggtggcacatgcctgtaatcccagctactcgggaggctgaagcaggggaatgggctgaacccaggaggcggaggttgcagcgagccgagctcgcgccactgcactccagcctggcgacagagcaagactccatctcaaaaaaaaaaaaaaaaagaccacacaagcaggggtgactggctgagtgaggcaagaggggtaagaagagaatgaacccacggccaaacgttgtcaagaattagctcaatgccaagcgagtggagtaggaagagaatcagcccgatgcccagtgttctccaaggagaacatgaaggctgtcccaagatgacaggatgacaggcagattggggcaacctgccatgttggcctggggggcaatactgggcctgaagctcagagcagcagacagtgagccaggccctcccatcttcagggatggtcactccctgccctggcccgccccatggccccacaaacctgtccctttgtatttgtccacaaaacagtatttgagctcatagtcactgagcaggtcatgtacttcctgtggagatacaagacaaaagacagggagttactggagatggaagggggcaacccagtgccgcttcatagctgccaccagctatgaaggcaggtcaattaccaccccccattttaccaatgaggaaactgaggctcgatgcagtaattttgtcaaggtcattctgctcatacctggcagagatgggattcagaacctagctgcagactgtgctattacccaggcaacatgctcttagagggtatacctttagctggctgggcggggtggctcacgcttataatcccagcattttgggaggccgaggcgggtgaatcacctgaggtcaggagttcgagaccagcctggccaacatggtgaaaccttgtctctactaaaaatacaaaaattagccaggagtggtggcgcacacctgtaatcctagctactcgggaggctgaggtaggagaactgcttgcacccaggaggcagaggttgcagtgtgccactgcactccagcctgggtgacaaagggagacactgtcaacaacaataacaacaaggccgggcgcggtggctcacgcctgtaatcccagcactttgggaggccgaggcgggtggatcacgaggtcaggagatcgagaccatcctggctaacaaggtgaaaccccgtctctactaaaaatacaaaaaaattagccgggcgcggtggcaggcgcctgtattcccagctactcgggaggctgaggcaggagaatggcgtgaacccgggaagcagagcttgcagtgagccgagattgcgccactgcagtccgcagtccagcctgggcgacagagcgagactccgtctcaaaaaaaaaaaaaaaaaaaaaaaaaaataacaacaacaaaaaaaaaaaaaaaaaaagaggccgggctcacgcctgtaattccagcactttggaggctgaggcaggcgggtcacaagatcaagagatcgagaccatcctggccaggaaggtgaaaccccatctctactaaaaatacaaaaatcagctggctgtggtggcgtgcacctgtagtcctagctactcgggagactgaggcaagacaattgcttgaacccgaggggtgaaggttgcagtgagcagacatcaagccactgcactctagcctggcgacagagtgagactccgtctcaaaaaaaaaaaaaaaaaaaaaaagagtatgcctttagggaagccatttaacctgcatgaacctccttttgcaagattcactgtttccaacaactctgtaagtgaagtattaacaaactcatgttgtatatgagaaaacttaggctaggagaagtgaagagatctgctggaggccatgcagttgggcagcgcagccacccatgggtacctgactggggagcccaccttctagtaagccccacgttgtgtgggttcacatgcctcccaatttcctcctgctgataaagctgccctcttccaagccagctcatttatttttcttttttttagagatagtgtcttgttctgtcacctaggctagagtgtagtagcacaatcatagctcactgcagcctcaacctcctaggctcaagtgatcctcccacctcagcctcctgcgtagctgggactacaggcacgcaccaccatgcctggctaatttttaaaaattttttgtagagatgagggtttcactataccgcccaggctagtctcgaacccttgggctcaatacagcctcttgcctcagcctctcaaagtgctgggattaaagggatgagccaccatgcccagcctctcaagccagctttgaaggcaaagtgctggcgcctgctgggaccagacacactgtgcatcttgcaggagagacaatgtgttcccagctgagagactgcagacactgagaggaagacccagaaagaaacctgaccatccttaatgatccctgtcccgatctgtccccaaattcagcccctcccaacatccctggggttccactagccacgtgcccacccggtgtgctggtgggccggagagcagggaatctcagcagcaggaagcgagaacctatttcaccgccatagggcagggcagtatagatgccatttccctgggtccaaagagcattgggaagcgctgccccatgctggccccatgagaagggcactcctagcaggaagattagccacgaggggctccatagaacacaggcctcgcttccttcctgtaggtctgtaggctggtggcagaagaccccattttcccaaattaatcctgaggttttgggggctgagacccaggggctgctgttaacttccggatttatctctgagagcagtgaataaacgcgtgatatggaggggcgtactctccgcagtcctgaaacttctggatgtgaggtcccgccaccctgtggtagagtgggtggagaaaagcatcatccaagcagggggcaactggtggtccaatgtaccagcccattcacaattccccaacaggaccaaagctgtccgcccccttccattccccgcccgcttccatcacttggtgtcgcccaagcctgtggtcgcccctagcaacgccctccctcacttcgcagtcggtttcccctttcatcatcgcccccccacgtcccgctcttggtctctcccgatcccgcgtggatccggtgcttgggcgcccccgccaacgacccccgcgcacctcagcgttggtgtcgcccggttccccccgcgcacgcgcaccgtggtatttcccgccacgctcctacaccgccccccccaatacctggttggtcacgtcccccgggaggccccggatcagtatcttgcggcggttacggaactggcgctcggtgtgttccaggcgtttccggatctcttctggatctagaggcggcagctcttcttccggcgcccggcgctccgcggcatcgccggcttcgacttcggccccagacttagggctcagcgggggccggtgagtaacggacacgtccgccgccatcttgggaaacccggcgccttctgggaccagcgagccggggcggagcggcatagagcggcaacgagggcgcgcccgtcgattggctgggagaaaccccacctccttcccgccccccttgccccgttggctaagccccagcccacctctcaagagttcaagctgcgtctgcgcgccacaggccccgcccccttccgtcgcagcgacgctactcagtggatgtgcacctgggtgggagagacttgcagcgcgggtggaatcaaaccacagattagggagtttgaaggctttattggtgcggaatctgagggcacagccaagcccccgccaactttgatcccggatcccagcgtcactcagctctggacggttcttcccccattgcttctgtcggctgcatagacgtgaggggcagataggtgctctcctccctaacatggtaactgccgctccgttggtgctccctgaagacgtacattaaggccagtacgatagtcaccacgcccagggtcagtaacaccgccacgaagacggggacaaagtgggagctcccagctgtgcagagaaagcgctaagtcaatatgcgtcccttctgtctccaacccccccgccccccggcttaccggtccagacccgcagccccgtgttagctcaccctcaatgtccatcaccacgaccagggtgtatttgcctcgtgagctggacgcttggcactgataagtaccattatgtgttacgttgacgaagaacgggatccccaccggcacctcccggctggagccttccttcaaacaccgcagctcggggtacgggttgcccctggcttggcactgcaggacgtgtctcgttttatctttccatttcaagtgctgggggcatgtggctcggtcaattttgggaccatctgtggaaccaccatgtgtgatcagacacccaacacacccgaggcacagtggtgcagaggagcgtctaatctttccagggcaggggtggagggattaaaggtcagggtgaccgactcacacaggactcgcagctggacgctactgttcctgtgcaagaactcgccgtccacctcgagagtggcactgcagaagaagctgcgtccgtcgtcactctcggtagcatttagctgaagttgagctggctgccccggggccgcggccggaactccgtccagcgtgacctggactcgagccccagccatgcaactcacggtcactgtggacccctcatgggcggtgggctcgctgaggttcacaatgggtcctaggaagcctaaaggcggggcattgcccaggagcttaatgaacaggaccttcctgtgggtcaagccgctccctccgccctcccctttcctctcgggatatccgggccacgctttcggccgttcaagcctcgccctctttccgcgctgtgtccagcttcgggcactcaggcccaacccacgttgcaactgctattggggcaagccaggccccaccttttcggctagtctccgccccctctgccacgcccccagactgctgaggccgcgcccccttcccacgcctcctcttactaaagaccgtcaagttctcccgggcctcccgtctctcgccccctagggtcacgttgcagacgatctcccgggcaccctcctgatccgcgcgcgccgtggctgtggctgtggccgttagcgtgtccccgtggttcatgactgtcgcattcagcatctggtcccccagcgccaggtagacctgggcctctgaggctggaaaaagcccgtctagggtgcagtccaccggccacgacgtttccacctccaagaaccggggggccacgaggcgcgggggggtcacgggcaggactggggagaaaggtgggcatagtacaacccccaggactgtgccttccccaggacaccctcatcccccccagtcaggatatcttgctgactgggtcacccttcttcacaggacacacacacagggccatgaaaacggccttcttcaaagatcccacggctcgggcctcccttccggggccaccttgcccagtggccgggggctttccttcccagaagcctgtgaggtccggggtaccccactctcaggaaccccaaggtcagggcaccgtctaccctggctcagctcgtcacccaccgtctgaagccccttctctcaccaaaggttcggagctggcggggggctgaggtgttcacgaacagtcccagcccctggggctgcatgtccagttctgtgcggcatgagaaaggggctccgtggtcgtctctgctggccagcacagtggcagtgacctccgctggctcctccactgcgggctgccggctcagctcctcctcccagcgaagcagcaccaccgtgaggctggtccggggcgacccatcctccacttggcagcgcagggtgaagttctggcccaccggctgccaaggaggcaggggtgccagctccacacgctccgggagccctgagagaggaggggaggatggcacttagcgggtcctgcaaacccacccactcaccccagggactggggaggagacagggtggtcctgccgagaactgtgagctttgagttaataaacttagagggcttagagctgggccagtcgaagcgtttgctattatcattagcgcagtgattatcatttcctgtgttgtcagataccttgcaaggcgctaaacaaaactttctgttctcaaagatggcacaataaaaaaaaatgaggatggaagggatgaacgtttatgactatgatatgaatattaaaaattcctgtttatggccagacgtggtggctcacgcctgtaatcccagagctttgggaggccggggtgggtggatcaaaaggtcaggattattcagttctctccaatcaggttcagacactcagggctttcctggttcaccagccctgtggcagcctctcaagatactccggcacagtcacaggagacttgacactcccaggctgggtgccctccccagtacacctacaaaacgctgggcctcaggccgggcactgtggctcatgcctgtaatcccagcactttgggaggccaaggtggacggatcacctgagaccaggagttcaagaccagccttgccaacatggtgaaaccccatctctactaaaaatacaaaaattagccaggcatggtagcacgtgcctgtaatcccagctactcaggaggctgaggcacaagaatcgcttgaacccaggaggcaaaatttgcagtgagctgagatagtgccactgcactccagcctggcgacagagagagactctatgtcaaaaaaaaaaaaaaaaaaaaaaaggctgggcaaggtgactcatgcctgtaatcccaccactttgggaggccgagggaggcggatcacttgaggtcaggagtttgagaccaacctggcccatatggcaaaaccctgtctctactaaaaatacaaaaattagccgggcatggtgtcacacgcctgtaatcccagctactaaggaggctaagacaggagaatcacttgaacccaggaggcggaggttgcaatgagctgacatcgcgccattgtactccagcatgggggacaatagcaagactgcgtctcaaagaaaagaaaagtcaaaaagtaggccaggcatggtggctcacgcttataatcccagcactttgggaggccaaggcgggcagatcatttgaggccaggagtttgagaccagcctgggcaacatggtgaaatcctgtccctactaaaaatacaaaaattagctgggcgtgttggcatgcgcctgtaatcccagctactcaggaggctgaggcaggagaatcgcttgaacccggaaggcagaggttgcagtgagccaagattgcgccactgcactctagcctgggggacagagtgagactctgtctcaaaaaaaaaaaaaaagaaaagaaaagaaaaaaaaaagtagccaggcctgcaatcccagctactggagagactgaagtgggaggattgcctgagcccaggagtttgagaccaacctaggcaacatagggagatcctgtctctaaaataaaggtataaaaaagtgtaaatgtaaaacctccatttgcctactgctgactgaaaggggtacccccttttttgcttaagagacaagggtcttgcttttttgcacaggctggagtgcagtggtgcaattatagctcactacagccttgaactcctgggctcaagcgattctcccaccttggtcccccaagtagctgggacttcaggcatgtgccaccatgcccagctaatattttttatttatttttgtagagacggggtgtccctatattgctctgcctggtcttaaatttccggactcaagcaatcctcctgccttggcctcccaaagtgttgggattattgttggggccaggcgcagtggctcacacttgtaatcccagcactttgagaggctgatgtgggcggaacaccccgtctctactaaaaatacaaaacttagctgggcattagctggacctgggaggcagaggtcgcagtgagccgagattgcaccactgcactccagcctgggctacagagtaagagacgccatctcaaaaaaaaaaaaaagcttgttggggccgggcgcagtggcccatgcctgtaatcccagcactttgggaggctgaggtgggcggatcgcctgaggtcaggagttcaagaccagactggccaacatggtgaaatgccatctcaactaaaaatacaaaatttgctgggtgtggtggcgtgcatgtgtaatctcagccactcgggaggctgaggcaggagaatcacttgaacccaggaggcgaaggttgcagtgagccgacatcgtgccactgcactccagcctaggcaaaaagagcgaaactctgtctcaaaaaaaaaaaaaaaatgcttgttggggcccaagttaattgatttcacaactgctgccttggcatgagattgagatgcgtctctatatctctgtctctgtctctgtgtctctgtctctgtctatctttgtatctcacacacaaatgtccaggtctgagctctgggtcagaactgtggtccattctttgcaaactgagggtccccactctcctgagccattggccacttgcccacaccactacccaagaccagtcccacctccggacacgtcgactcactgtacacggtgatgttagaggagcctgttatctgagagccattgcagtacactgagcagaggatccgactgttgccagtcacgttgctgagattgaaggctgcccagcccatgccactggccaccagctcctttgatagggacgtctccaaggcgattttctcagagctgggacaatcagtactgcagttcacaaacagggaccctccagcagagagcacagggttctggggctccacccgcaaaaggaactcctgcccctggacaccttcaggaacatgaagaagtcctggtgtttgtttccttgtcccccaacccacgcatcaacaggccccaccatttaacacctctctccttgtgccgagacagaagggttcctgccttcatggtccagtgggaaaggtagaatccatcagagaccggggagaactcagaaggaggccagaagaggctctgatccagcataggaggaggtgagtcagggaaggcttcctggaagcggggaccattgcagcccgaaactgaaggctaagtaggagttagcaagtgaaagggacaggtgatcctggcagagggaagcacatacgcaaagggcaaatttcaggagttcagatggagcaggaagcatgaggggtgtgtgtgtgtgtgttaggggagagggatggcgtacaagcctatgctggggcctgaccacctgaaggctgaactaaggaaccagaactttctcccgaggatacagagtcagcggccaggtcgcagtgtggcaggatgtgaacagcgttgcgttctattcctctaccctctactgatccccaaaacgcagccctctccagccctccccggcttgactggtctcacctggggtcagcagacagcagaccagcagagtccagcaggccctgggccacaacacggatggtaccatggtggccattctgacagaggaaggtgccttcctgaggtgcccgaagggcaggcaggggaaaaggcggggcctcccactgcgacggaagcacagcggttaagattgcagaagtctggggactgcaccttgcccaggcctgtgggtggaaggggatgctgtggcccttgggggccagggtgggggacccagacggggctctgcaaagtggccagcactgctgagtctcccccagggaatgggctggtcccagttgcactgctggcccccatttgaattcacaggaaatgctaactaaactggtttcttttgttctcagcactgggaagcctgggtgggggggatgaggcatctccttctggctgaacttaggtgggtaggggaatattctgtccccagagaggaagttaatggggaaaactgtaggcaccattgtgtagatgttaaggtgggatttcgaggaaacattaaaaaacaaaaacaaaaacagaaacagaagcagagtcttgctatgttgccccgactggtcttgaactcctggccttaagatggcctcctctcatcttgacctcccaaagtgttgcgattacaggcgtgagccaccacgcctggccacctttgaagatcttgaggatacctccctatctttgaagatcttggggatcccccatcccctgcacaaagagctaaggtaggtgatttggggacagctgagtccctgagccactgtctatccaggattctacttggtttttgtttgtttgttttgagacagagtctcactctgtcacccaggttggagtgcagtggcgggatctcggctcactgcagcctctgcctcccgggttcaaacgattttcctgcctcagcctcccgagtagctgggattacaggcatgtgccaccacgcccggctaatttttgtactttttggtagagacggggtttcaccatgttggccaagctggtctcaaacttctgacctcaagtgagctgcccgccttggcctcccaaagtgttgggattacaggcgtgagccactgcgcccggccttccaggattctacttgtaactggcctttaccccatcctgttgtccccttgcccacccttccaggcagctggtcactgcattccaagggaaggcgccaaggggaccaggtgggacccccacctttgacctgcctctgacctcaggcctctgacctgccttctgggcttcacatctgagctccagagagagaggccttgttgagagccttgatggggccctgcactcacccactttccccagaccttgaggtcacagcacctcctctctcatctagagcacccccaccttcctaagcaggtccctcctctattcctctaccttccgaacaatccatttcccacctggtgttgagagagcagctaaaacccaagtctagtgtatttgtaaacagcagggaccagtagcatgggcctggtgcctgtagtcccagctccttggaaggctgaggtgagaggatcgcttgagcctgggaggtcaaagctgcagtgagtcgagattgtgcccctgcactccagcctgggagacacagtgagaccctgtttccacaaaaaaaaaaaaaaaaaaaaaagatgtcggacttactggctcacgtctgtaatcctagcagcactttgggaggctgaggtaggtggatgacgaggtcaggaaatcgagaccatcctggctaacacagtgaaaccccatctccaccaaaaatataaaaaattagctgggcattgtggcgggcacctgtagtcccagttactcaggaggctgaggcaggagaatcacttgaacccaagaggcggaggttgcagtgagtggagattgtgccgctgcactccagcctgggtgacagagcaagactctgtctcagaaaaacaaacaaacaaacaaacatatatatataatttataatacttacgtaatagtgagaccctgtctctaaaaataaaaaagaaagaaatatttgtaaataagtcatatttcttttttgttttttgaaacagagtctcaccgtgtcgcctaggctggagtgcaggggcacaatctcagctaactgcaatctcagcctcctgggttcaagtgatcctcccacctcagcctccctaggagctgagaccacaggtacacaccactgtgcctggctaattttctgtagagacggctttcaccatattgcccaggttggtcttgaactcctaagcttaagggatctgcctgcctcgacctcccaaagtgctgggattataggcgtgccctgctacacccgccagtaatatttctgataaagaagtatttctgggccaggtgtggtagctcacgcctgtaatcctagcactttgggaggctgaggcgggcagatcacgaggtaaggagatcgagaccatcctggttaacacggtgaaaccccatctctactaaaaatacaaaaaaaaattagccccgtctctactaaaaatacaaaaaaaaatggtggcaggtgcctgtagtcccagctactcgggaggctgaggcaggagaatggcgtgaacccagaaggcggagcttgcagtgagccgagatcgcgccactgcactccatccaggctgggcaacagagtgagactccatctcaaaaaaaaaaaaaaagagtatttctgggccaggcgtggtggctcacacctgtaatcttaacactttgggaggcctagacaggcggatcccttgaggtcgggagttccagaccagcctgggcagcatgccaaaaccctgtctctactaaaaatacaaaaaatcggccaggtgcagtggctcacgcctgtaatcccagcactttgggaggccgaggcgggcggatcacgaggtcaggagatcgagaccatcctggctaacacggtgaaaccccgtctctactaaaaaaaatacaaaaattagctgggcatggtggcgggcgcctgtagtaccagctacttgggaggctgaggcaggagaatagtgtgaacccgggaggcagagcttgcagtgagctgagattgcgccactgcactccagcctgggcgacagagcgagactccatctcgaaaaaaaaaaaaaaagtacaaaaaaatcagccaagcttgatggcacacacctgtagtcccagctactcaggaggctgcagcgggaggattgcttgagcccgggaagtggaggttgcagttagctgagattgtgcccctgcactccagcctgggcgacagagaaaggtcacctacacatgtttaaggggcctctgcacatatctcaagccattgacaagaaagcaagtacagtctggattgcaaacaatgtataatttaagctccagctgattttttttttttttttgagacagggtctcagtctgtcacccaggctggagtgcagtggcatagtctgggctcactgcaacctctgcctcccaggttcaagtgattctcccgcctcaacttcccaagtagctgggattacaggcatgcaccaccacacccagctaattttttgcatttttagtagagacggggtttcaccatgttgaccaggctagtctcaaactcctgacctcaggtgatccgcccgcctcggcctcccaaagtgctaggattacaggcgtgagccaccgcgcctggcctccagctgatttttgacagccacattgttgctataggatcctttttacgtgtgatggtgatggtctctggttctcctcattcccacaaaggttgttgaaccacagcaccagtaacactgagaatgctaagggctctagcccaggctttctcccaggttctctggtgtgcgccctcctggtgacaatgaaattgaagctaattgctttcactggttgagtctctgatcttgagtggctgtgtccacatttcattttttttttttctggtaggaataactacttttctgcatccatgctccatagactctgtccttttcagacatcctgggataaaaagatttggcttttttttttttcttcttcttcctgagacagggtctggctctgtctcccaggctggaatgcagtgacataatcatggctcactgcaaccttgacctcccaggctcaggtgatcctcccacctcagcctccctagtagctgggactataggtgtgtgccactacactcggctaatttttgtattttttctacagaggagcttttgacatattgcccaggctgttctcgaacccctgggctcaagtgatcctcccaactcaacctcccaaagtgctgggattattacaggggtgagccactgtgctgggctttcactcttaggctattaaacaatgaaggtagttattgatcctatctctttcatattcttcttctttttttttttttgagaatgagtcttgctctgtctcccaggctgggctcactgcaatctccacctcccaggttcaagcgattctcctgcctcagcctcctgagtagctgggatcacaggcgtgcgccaccacacccagctaatttttgtatttttattagagacgggggtttcaccatgttggtcaggctggcatattcttctttctaagaactgagagtgagggggctgtattgaatctcttcatgcaccaggaactgagttctgaagatgatcttattattatcagtattttttgagatgggttctcactctgttgcccaggctggagtgaggtggttcagtcttggctcactgcaacctctgccttccaggtccaagcgattctcctgcctcagcctcccaagtagctgggattacaggcgtctgccaccaggcttgagctaccacgcccagccaaaagagcatatattatgtatagaaataataagacgagccaggtgcggtggctcatgcctataatcccaggactttgggaggctgaagcggatggatcacctgaggtcaggagttcgagaccagcctgactaacatgaggaaacccagtctctactaaaaatacaaaaaattagccagacatggtggctcgtgcctgtaatcccagctactcaggaggctgaggccggagaatcacttgaaccttggaggagtttgcagtgagccgaggtcacaccattgcactccagcttgggcaacaagagagaaacaacgtctcaaaaacaaacaaacaaacaaacaaaacccaagaaataataagaccatttggaattactggactaatagaatagttaaggtttcttatagaggcaataaaatgtattttgaaagagctgctaactattgatgctgacagtatttcattcctgtgagtgactcaagcatattataaatagctagtaaaagcctggccaacatggcaactaaaaatacaaaaaattcaccggacgtggtggcgcatgcctgtacttacagctacttggaagactgaggcccaagaaccgactgagccctggaggccgaggttgcagtgagccgagatcatgccactgcactccagccaggatgacagaggagagagactccgtcgcaaaaataaaaataaataaataaataaatacctcgtaaagggaacggagcctgtggggttgagcaaaatgtactagctgtgcctgcagtgagtataacagctttacgattatgaggaaacaattttttcttttctttttttttttttgagattaagtcttgctctgtcgcccaggctggagtgcggtggcacgatctcggctcactacaacctccacctcccaggttcaagtgattctcctgcctcagccacccaagtagctgagataacaggcgcccgccaccacacccagctaatttttgtatttttagtagagacaggggtttcaccatgttggccaggctggtctttaactcctgacctcaggtgattcacccaccttggcctcccaaagagttgggattacaggcatgagctactgcgcccggccccagccaaaatttttaatagcaatgcagaaaaagaagaaaacatgacaggcgcagtggctcatgactgtaattccagcactttgggaggctgaggcgagcagatcacctgaggttaggagttcgagaccagcctggccaacatggcgaaaccccatctctactaaaaatacaaaaattagccaggcgtactggccccacgcctgtaatcccagctactcaggaggctgaggcaggagaatcacttggacccaggaggcagaggttgcagtgagccgacatcgtgccactgcactccagcctgggcgacagagcaaggctccatctcaaaaaaaaaagtcaacaagacaaacaacctagtttcatccacaaatatgttgcaagggggcaaaagacagaaagaggaacccacagaccaaaagagacgtaagaaaactggcctcgagcaaatgcaattggggactttgtttgtatttttatttatttttattttttattttattttattttttgagatggagtttcactcttgttgcccagactggagtgcaatggcacaatctcagctcactgcaacctccgcctcctgggtttaagtgattctcctgcctcagcctcctgagtagctgggattacaggcacacgccaccgcatccggctaatttttgtatttttagtagagatggggttttgccatgttggccatgttggtcttgaactcctgacctcaggtgatccgcctgccttggcctcccaaagtgctgggattacaggcgtgagtcactgtgcccggccctgtatttttatttattttattttttcagaactaaaagagacttacagaaaactggcctcaaccaaacgcaattggggaccttgtttgtatttttatttttttattcagaactaaaaataaatgatctattgggcgggtgtggtggctcatacctgaaagcccagcactttgggaggctgaggtagagggatcatttaagcccgggacttcatcaacctgggtaacatggagaaacttcgcctctacaaaaaatacagaaattagcttaagcgtgggaggcggaggttgtagtgagcagagattgcgccactgcactccagcctggatgacagagcaagactctgtttcaaaactatggggacagtaaataacagatcagcagttgccaggggttagtgagaagagagggatgaacaggcagcgcatgaatgacgtttagcgcagtgaaactactccatgtgatactatattggtgggttcatgccttatacgtttgtccagccccacagaacgtacaacagcaagagtgaaccctcatgtaaagtacagacctcaggagaaaatgatatgtcagtggaggttcatagattttttttttcagacagagtcttgctctgccgctcaggctggagtgcagtggcatgatcttggctcactgcaacctccaccaccacctcctgggttcaagcaattctcttgcctcagcctcctaagtagctgggagtacaggtgcctgccaccatgcctggctagtttttgtatttttagtagagatggggtttcaccatgttgcccaggctggtctcgaactcctgacctcccaaagtgctggaattacaggcatgagtcaccgaggttcatagattctaacacatgtatcactgtggtacaggataggtcagcaagggaggttgtgcagggggatgggagggaggggatataggagaactctgtattttccactcaactttgctgtaaacctaaaactgctctaaacaaattgagtggttatcctactactcaagaggctaaggtgggaggatcacttgagcccaggagtttgagaccaggctgggcagcagagtaagacgctgtgtctacaaaaaattttaaaattagccagatggccaggcatggtggctcacacctgtaatcccagcactttcggaggctgaggtgggtggatcacctgaggtcaggagttcgagaccagcctggccaacatggtgaaatcctgtctcaactaaaaatacaaaaatcagccaggcgtggtggcgggcgcctgtaatcccagctactggggaggctgaagcaggagaatcgcttgaaccctggaggtggaggtcgcactgagcctagaccgtaccattgcactccagcctgggtgacatagtgagactccctctcaaaaaaaaaaaaaaaaaaaaaaaaaaattagccaggtgacgtggcaggagcctatagtcccagctcctacagaggctgaggtgggaggatcacttgcgcctgggaggtcaaggttgccatgggctataatagcaccactgtactccagtgtgggtgacagagcgagacccagtccccagccccacaaaagaagtccttctggggatatttaactgcctttcacaaatgtgtctgacccaccatctcaagtcacacaggctaagtagaaacgctttgccaaacaccagaataacaataatacctttttcttttcttttttcagacagtcttgctctatcgcccaggctggagtgcagtggtgcgatctcagctcaatgcactctgccttccagttcaagcaattctcctgcctcagcctctagagtagctgagattacaggtgtgtgccaccacacctggctaatttttgtatttttttcctcaacaagaacaaacttggtaaataacgatgattgttcatggtttcagactccttttttttttttttttttttaagttccagggtacatgtgcacaatgtggtttgttacataggtatacatgtgccatgttggtttgctgcacccattaactcatcatctacattaggtatttctcctaatgctatccctcccgcaggcccctaccccacaacagaccccggtgtgggtgtgtgttgttccctgccatgtgtccaagtgttctcattgttcagttcccacctatgaatgagaacatgcggtgtttggttttctgtccttgtgatagtttgctgagaatgatggtttccagcttcattcgtgtccctgcaaaagatatgaactcatcctattttatagctgcatagtattccatggtgtatatgtgccacattttcttaatccagtctatcattgatggacatttgggttggttccaagtctttgctattgtgaatagtgccgcaataaacatacgtgtgcatgtgtctttttttatttttttttgagacagagttttgctcttgtcacccaggctggagtgcaatggcttgatcttggctcatggcaacctctgcctcctgggttcaagtgattctcctgcctcagcctcccaagtagctgggattacagacgcctaccacaatgcccagctaatttttgtatttttagtagacaagggttttgccatgttgggcaggctggtctcaaactcctgacctcaactgatccgcccgccttggcctttcaaagtgctgtgctgggattacaggcgtgagccactctatccagccaacttcatttttaaaatttttattttaaaataatataggctaggtgtagtggctcacgcctgtaatcccaacactttgggaggccgaggcgggcagatcacctgaggtcaggagtttgagagcagcctgaccaacaagatgtaaccccgtctctactaaaaatacaaaattagccgagtgtggtggcgtgcgcctgtaatcccagctactccggaggctgaggcaggataatcgcttgaactcaggagggggaggttgcagtgagccgagatagcaccattgcactccagcctggagaacagtgaaactgcctcaaaaataaataaacaaataaataaataaataaaaatacggacaggatctccctatgttgcccaggctggtctcgaactcctggactcaagggatcctcctgcctcagcctcccaaagtgctggggttacaagcaatgagccactgcatccagtcaacaataatattgtatatttatttatttaattattatttttttgagacagagtctttctctgtcacccaggctggagtgcagtggtgcaatctcggctcactgcaatctccgcctcctgggttcatgacattctcctgcctcagcctcccgagtagctgggactacaggcacccgccaccacgcccggctaatttttttgtatttttagtagacggggtttcaccgtgttagccaggatggtctcaatctcctgaccttgtgatcctcgtggcctcccaaagtgctgggattacaggcgtgagctgccgtgcccggccaatattgtatatttattaagcacttgtttgcatgtctttctgctcagcatttcacagacaccacctcatgagctctttacatgagtcctatgagatagcaagtgtgaagctcccataatggaggactaaggcccagagaggtgaagccattagcctgaggtcacacaaatgtgaaagggtgaaactggcagtctaatctatgtggcttgtgaccgccccgaccaaatactttgtgtattcaacaagtagttattggccaggcgcaatggctcacacctgtaatcccagcactttgggaggcggaggcaggtggatcacctgaggtcaggagttcaagaccagcctggccaataaggtgaaacctcaactctactaaaaatacaaaaaattagccaggcatggaggcggtcacctgtagtcccagctactcgggaggctgaggcaggagaatggtgtgaacccaggaggcggagcttgcagtgagcctagatcacgccactgcactccagcctgggcgacagagcaagactctgtctcaaaaagaaaaaaaaaaaaaagttaaacagttgaatccagccacctctgcgctgtctcatgctagctgctgtccacaggagaccagactcccagctaacccagctttcttgaagagggctccaaaaatcacaggctccagcagagaaaacatgagtttattaccagatggtggagatggtgggcctcaagtttggaagctgggggatttaagggctggattagtgcccctacaaatgttgggtccctcaagatcatggttaggctcacggccaagaaagaaaaataagttcacagaggtggggtctctagacaggagtaaggcacacggtgtgggtgaggctgacatccccctcttggtttcatcctggagcagggagcaggaggctccctctgcagccactgcctggtccagtcctcccaggcagggctgccattgtgcctcagcacacgctgaacactgaaggggcctggccttggtacttctcatggactgtcttcagaatgggtatgaggttctcgaaggttgggcgaaaggacgcctctgtctcccagcagttcttcatgagatgatagacctagaaggaaaaaccagggctggtgggggctgccctctccacagcaggatagtggggtcagggaaagacaaaggaagtctcacctcacagggacatttgtcgggccgtggcagcctctcccctcgttccagcaactcagtgagtctcagaactgtcatctgaccctgagcaatgcctatgagctcaaggaatttctacagtataaacaagacaagctcttttcaagaggcaatgaaaggcaggcacggtggctcatgcctgtaatcccagcactttggaaggctgaggtgggtggatcacctgaggtcaggagttcgagaccagcctggccaacatggtgaaaccccatctctactaaaaatacaaaaattagctgggcataatggcaggcgcccgtaatcccagctacttgggaggctgaggcaggaggatcgtctgaacctgggaggcggaggttgcagtgagccgagattgtgccattgcactccagcctgggatacaagtgtgaaactccatctcaaaaaagaaaaagaaatcactctgcaacttcatgaaatcgactgcatgggttccaatcccacctcttacacttctcagctgtgtgactttgaatttgagttcacttctctgggcctgttttctcatccgtaaaatagggtaataacatctgccacctgggattactgtgaacgttaaactaatattcatagagtaagcgtgagtcaggtgtttgccgttattattaagcctcacagcagattgttcttaccgtccagaattttttttttgagacagtctctcgctctttcacccaggctggagtgcagtggcatgatctcggctcactgcaaccttcgcctaccgggttcaagcaattctccctgcctcagccgcctgagtagctgggattacaggcacctgccaccacgcccggctaatttttgtatttttagtagagacggggtttcaccatgttggccaggctggtctcgatctcctgacctcgtgatctgcccgcctcggcctcccaaagtgctgcgattacaggtgtcagccaccgcgcccggcctatgcctttctttcctttcttttctttctctctctctccgtcctgtcctgtcttagacggagtctcgctctgtcacccagctggagtgcagtcgggagatctcggctcactgcaagctccgcctcccgggttcatgccattctcctgcctcagtctcctgagtagctgggactacaggcgcccgccaccacgcctggctaattttttttgtatttttagtagagacgggtttcaccgtgttagccaggttggtctcgatctcctgacctcgtgatccgcccgcctcggcctcccaaagtgctgggattacaggcttgagccaccgcgcctggcccagcctatgcctttctaattgctctagcaaactcccggtggggctgcgggcctggctctcaccgtgggggggctctggctggagtcacagtgcgtcagcagctcatacagggtcaccccgaaggaccagacatctgacgcatagtagaacttatactccttcaggcactctggggcatacctagggggaggggggcactcaggccacggggggctgcactgagggcttggggatcagaccaggctgaagccctcacctgagactgaaggaccctctgggctcagttgggacccacccttaagagcgcagcctgagcggggtgatatgctcattggctaggccgctcattggctaggccgggttaaccccgcccaccaggccaagccgcactctatacaccgccccttgcctccataggccccacccccgcaccgctaggccccgccgcgcttcactgggatcatgccctatcatgatacccagcatccgtctactccaccctgcctgttccaagtgaccccagcaccccctcagactgcaccccgcctggtcaccagaacacggggctgtccccatcctcgcgcacgcggtagtactcgtggccttcgggcacggccttggctaggccaaagtccccgatcttgaccagcctgtcgttgtccagcagcacgttgcgcgcggctaggtctcggtggatgtagtgctgcgcgtgcagataggccatgccctggggacggggcagggctcgtgagtttcagtggggcggggttcggccgggggcggcggcaggacctgagcagccaggagggctgggggacagtcaggtcaggccggtggctacccggccgctggagagggccggatggcacgtggcaccaagcaaaaggaggctgagccagaaagcagggacggggctagacgagcaaagctgggcaggagggcgagttgggaggggccgagccggctgtgcgtggtcccttgggaggagggggtgtggccaagcaagccaaacagttcggaggtcagtgcaaggacaagacagcctgggcaaacgagcaggggcggagcgtgagagcagactgcaccggatcgctcaggccagcccaagctgaagaggaaggggcaagctccagaagcaggggcggggccgaccaacctcgcagatctgctgggcgaagagcagcagctgggccagcccgatgctgtgccggggcaggtagtctcggaggctgcccaggggcacgtactccatgaccagctgcagcgacttctcgcctgccgcggagaggggcggccccggtgggggacgatagagggcgggccggggaccgcctaccttgagcccagcagagcccctccaaggtcgggagggaaggccaagacccgcgcacactagacccagttctcaggtgggatggacccatccagaaccccattctcacttgagggagctgctggtggctcccgtccatcctggccccagcaggtagcaccccccagatgggaaggaggcagcccagccacgctcacccagatgccaagaaccgcgtactgcagcctggggttgagagtctctaattggctaggccagactggccccgcccacaaggccacacccacgctctaaccacgccccctcaagtctctaggactcgccgggtcccgcccaccttggtcctcgcagcagcccttgtacttgatgatgtgctcgtggtagagcgtgcgcagaatgtcaatctcctgcttccagcccgagcggtgctgggggccgcagtctgccttgagggctttcaccgccaccatctcgccagtgccgtcgttggtcggatcgtagcagtacaagctgaccttgccgaagtgaccctggtcgggagcgcacgagggtcagctccacctccccaatccctgcaccactccccaacccccgatttcccgggccactcctccaggcagatcctttcggaataccccaggccccgcctactccgctctattaagactccttggcacctaggcctccctcaaagcagagggtcccacccacatctcctgagaatcaccttaggtaggaatttatcctcaacccccaaactccttcccgaccaggcgggccttttagcagctcaggcccgtccctcacctcgcccagatctcggatctttttcaaatagcgcttgtggaaaaccgtagggtccgacgccggtgagtccgggttcacagtcaagacgtcagcaagatctggaagagttgcggtgggtaaaggcctgaccccgatcctttccccagcaggcccacacttgggagtcacaaagccagccacagctaccccaggatccgattctagaggtaagaaaactttttcctgcaacagctgaaagagtccacttattgtacaaaatgatgcagagttggctgcatcaaaactgacacctgtttgggaggccgaggcgggaagatcacttgagcccgggagttcaagaccagcctggacaacatggtgaaaccccctctctacaaaaaagttaaaaaaaaaaattagccaggtgtggtggtgcatgcctgtggtcccagctactcaggaggctgaggtaggaggatcgtttgagcccaggagttttgaggctgcagtgagtctgggccacagagagacactgtctttaaaaaaaaaaaaaagaaagaaagaaagaaaaagaaaaaacagaaaaacctgacatctggaagttccgagattgggtagagggcacagatatttcatagagaaaagagaaaaactggccaggcgtggtggctcacacctgtaatcccagcactttgggaggccgaggcaggaggatccctagagcccaggagtctcaggctgcagtgagccatgatcgtgcctctgaataaccaccacactcctgcctgggcaacacagcaagacctagtctttaaaacaaaaaagagaaagaaaaatgtgatatgaccagttgaaaatggcatattaggccgggcgtggtggctcacgcctgtaatcccaacactttgggaggctgaggagggtggatcacctgaggtcaggagtttgagaccagcctagccaacacagtgaaaccccgtctctactaaaaatacaaaaattagctgggtgtggtggtggacgcctgtaatcccagctactcgggaggctgaggcaggagaattgctcgaacccaggaggcggaggttgcagtgggccgagatcgtgccattgcactccagcctgtgcaacaagagcaaaactccatctcaaaaaaaaaaaaaagaaagaaagaaaaaaaaaaagaaaataggtcaggcgcagtggctcatgcctgtaatcccagcactttgggaggccgaggcgggtggatcacgaggtcaagagactgagaccatcctggccaacatggtgaattcccgtctctactaaaaatacaaaaattagcccggcgtggtggtgggcgcctgtagtcccagctacccaggaggctgaggcaggacaattacttgaacctgggagacggaggttgcagtgagccaagattgcaccactgcactccagcctggcaacagagtgagactccgtctcaaaaaaaagaaaaaagagcatattaattttttaaagagaacaatacaaaacttttttaaaaagaaaaaaaaaactgcagtggtctaattctctaatccaaagaagttgtgtctctccccagacaaaacattaaggaggccaggcgcagtggctcacgcctgtaatcccagcaatttgggaggctgaagcagatagatcatttgaggtctagagtttgagaccagcctggccaacatggcaaaaccccacctctactaaaaatacaaaaattagccgggcatggtggcacacgcttgtaatcccagctacttgggaggctgaggtgggaggattgcttgaacctgggaggtggaggttgcagtgagccaagatcacgtcactgcgctccaggctgggtgacagagcaagattccattgcaaataaataaataaatacattaatgagagctcagggcagccaggcagggcatgcttatgaatgccactgcaagaaattggcacacaccctgaaccactgtgcagagacctctcgtgcgctataggcatacagcagggatcccagccccgtcccacttccccagggtcccagcactgggatggagctcactgtggggctgcagccgggtgaggtcacgcaggatggtgcggaatgatggcctctgggttggctcataggtcagacactggctggtgagtgtggccagctgtgggcaggagggctcgggcagccggtgctgcctctggtagaaatgctccttctgttgggaaagggacccagaggagtcaacatcctcccctcgcccccaacccgttccccaagaggcagagtcaagtccccagagtggaccgccaggtgcccgctcttatcagttccattatacagatgaggcaactgaggctccacaaagtgggaggacgtgctcacagccgtagaaccaggactgggacccaggtccagtgattatgcagagctggagtgtcacagtcagcctcctgccccaagcttccctcctgcccctcctgtagaccacagctccttaatacactgaagcctcagcctttgcacaggccatgcactctgcctaggctgcccttcctagccaggcttgttggcataattctacacttagataaaacctcttctggggccgggcactgtggctcatgcctgtaatcccagcactttgggaggccgaggtgggcggatcacctgaggtcaggagtttgagaccagcctgaccaatataatgaaaccccatctctacaaaaaatacaaaaattagccgggtgtggtggcatgtgcctgtaatcccccctactcgggaggctgagacaggagaatcgcttgaacccaggaggcagaggttgcagtgagctgagatcacgccattgcattccagcctgggcaattagagtggaacttcgtctcaaaataaaaccaccacactcatgaacctcctttgggaagccttgtctgaccccactgctgggtgaggcgcatcctcagcccttcttccccactctgcagcctgggcgtctcccatcgctgccctggtcactctgcctaaaactgaaatcaagtctcttacttgccttctgtgtgccaggcacaagtgacttccacaaggacctaaaaaggctgggactacattgagccccagcgagtggcccacctgctggtagcccagagagacttgaagtcacgaggccagaagggatgcagctttgagctctgattctgtcctctggatttcttggaggggcccccactgcggggagggcccaagggtctcctagacatacctcggagggactgcggctctgcagaggggcctctccgtcaaagcagatctccaggagggtggcgccaaacccccacttgtccatggcggtgcttaggctgttggccccacctggtaggcattcgggggccagccaggggatcctctccacccgctctgggaggccaaggtcagaggtcaccaagggtgaaaggagcaggggaagccccccactgtgcccaggtcccctcaggtactcaccctccctggagagggcgcccaggcccacgccaggatcactcagcttgatgaaggggctggtgccctctgccaaccccagccgggccagcaggatgttccggccacacacattaccatgaaccaggttcttgttctcctgaggtgggcaggagagggggtgtggccactcaggagaggcacagacgccaaccccaaacctggtccccatagggacagccaatgtgaaaaggacaactgtgactatcactgggtttctttctgttttgttttttggggggttatttttttcttgttttttttttttttttttttttttaagacagggtctcactctgtctctcaggttggagtatagtggcacgaacatagctcactgcagcttcaaactcctgggctcaagccttccaagtagcgagaattacaggtgcacatcaccacagcctagctgattcttaaatttttggtggagatggggtctagctatgctgctgcccaggctggggtgcagtggtgtgatcatagcttactacggcctcaaattcctgagctcaggtgatcctcccacctcaacttcctgagtacctcggcctacaggtgcaagttaccacattggctaattttttttgtatttttagtagaggcaaggttttgccatactggccaggctggtctcaaactcctgacctcaggtgatccacccgccttggcctcccaaactgctgggattacaggtatgagccaccacacctggctatttgtttatttttaaaagatggggccagctgggcgtggtggctcacgcctggaatcccagcactttgggaggctgaggcggatggatcacgaggtcagaagttcgagaccagcctgaccaacatggtgaaaccccatctctactaaaaatacaaaaattagctgggcgtgatggcaggagcctataatcccagctacttgggaggctgaggcgggagaatcatttgaacccgggaggcgaaggttgcagtgagccgagatcatgccattgcactccagcctgggtgacagggcgaaactccacctaaaacaaaacaaacaaaaaagatggggtctcgccctgttgcccaggctggtctcgaactcctgggctcctggccctccctgaccgacccaggccccacacacaggccacacaccaggtagctgagggcgctggccagctgctgggccaccaccatcttccaagccatgggcacatggccccgctccctccgcagccacacatccaggggtccgtgctccacgtactctgtcaccatgatatctgtaaagacacagctgctctggggcaacctgcctgcttctgccctctggatggcggggaattgggggagacgccagggagggacttggcatgtggctggggaggtgtcagggcagaggtgtgggtggagtttggtctgggttgaaagtgagtttggggagagaagaaatgcggaatgcagcagaggcagcggtggatgagggcattggggtccaagtgggatggggcacggaagaagttgaagttcaagagagaaaggtgggctgggcgtagtggctcacgcctgtaatcccagcactttgggaggctgaggcaggtggatcacctgaggtcaggagttcaagggcagcctgcccaacatgatgaaactccatcactactaaaaaaaaaaatacagccgggcgcggtggctcacgcctgtaatcccagcactttgggaggctgaggcgggcggatcacaagttcaggagttcgagaccagcctggtcaatatggtgaaaccccaactctactaaaaatacaaaaaaattacagtgaaaccccatctctactaaaaagacaaaaaaattagccaggcatggtggtgggcgccggtagtcccagctacttgggaggctgaggcagaagaatggtgggagacggagcttgcagtgagccgagatcacgtcattgcactccagcctgggcgatagagcaagactccatctcaaaaagaagaaaaaaaaaaaaattagctgggcatggtggcacatgcctgtaatcccagctattcgggaggctgaggcaggagaattgcttgaacccgggaggcggaggttgcagtgagccgagatcacgccactgtattccagcctgggtgacacagtgagactccgtctcaaaaaaattaaaaaaaaaaagagataaaggtggcagggtacagtggctcatgcctgcaatcctgtcactttgggaggctgaggcaggaagatcccttgagcccaggagtttgagatcagcctaagcaacatagtgagaccccatctctacaaaaaatttttaaaaatcagccgggtgtgatagcacacgcctgtcatcccaggtgctcaagaggctgaggcggaaggatcgcttgagcccgggaggtcgaggcttcagtgagccatgatggcaccactgcattgcagccggggcaacagagggagaccctagtctcacaaaaaaagagataaaggtgagcctacaaagtaagcaactagggatgggggggatgggcatggataagcagaggctaggggcttgaggttggggtgtaggagatgtttgggtaccagagtagtcagagggatgtgggtcagggtgtcggccagggtccaggggaaagtgggggagatgcacacacacacacacacaggggggttgagggatgggtgggtctagggttgttctgtacaagggctttattttttatttatttattatattttttgagacagagtctcgccctgtcgcccaggctggagtgcagtggtacaatcatggctcactgcagccttgaactcctgggctcaagtgatccttccattccagcctcacaagtagctaggactacaggcataggtcaccatgcctggccctgatttttaaattttttgtaaagatagggtctggacatgttacccaggctggtcttgaactcctgggtttaagcgatcctcccacctctgcctcccaaagtgctgggataggtgtgagccaccacacctagcctatacaaggagttttgagctacctgcagaggaaaggaagaggtggggttaggcagggttggatgtgcaggggctgaggcctaggagaatcagcacacatcagcactggagtctgcctgaggccatagtgctgatggggccaggagcagatgggggctggactgtagaggttgtttgggaggttgatggaagtggggatgtagttgggaatcagggtgggggttgagactgagggcaggtgagggtcgacgtgttgggatgtaagttatgggctggaatatcgttaggggttggggtctaggttgaaggtcaaggtgtagcccgggatcagagtacaggtgagagttgagaaataggcataggttggggtgtaggtcgagggttggggtacagatcagggagtgggtataagtcaggggtggcctgccaaagggggatgggtatggcgggacccactcactttcagggccgcgcacacagacgccatgcacgaaggccaggtgcgtgtgggagacctggctcatgaggctggctgtctcgtagaaggcctgtggggaccgggcaggtcaggtggctgcaaagccgacccctcccatcccacctcctccacggacacacccctcccatcccacctcctccacagacacacccctcccatcccacctcctccggccacctcctccacagacacacccccaggcctggccctgcccactcaccagggcgatgtcatggtgactagggtccagcactttgagcaccactcgtagctcctgcccacggtccctgccaggcacgagggggtcctcgtcatccatcttgccctcctcagggtccccgctgccctccactcgcaggcggccctcatacacgttggtccttgtgccctggcccaagtgggacagctgcgggatcatgtggcacagaataccgccatggtgaaagttagcagctgatctcccagggcccccagcacccacatccccaggggccctgcccttgccccgggccccttccctgcacccacctgggtgatctccttctggtcaacccggtggaagctgagctggctgaggttgagtgtcctggggctggcccgagccccccgcatgatgatgagattggaggtttctgggggcaggcatcaagtcatggagggcgggcctgggggagagatgccacatcccacccagaggtccccctatcatcgtacctcctggttggggcaggcaacagcgacgcagagagaagcagtcatccccggccctcagcaagcagccctgcaaggcagccccaagttcccgaacgctggggaaggaccggccccagccctccagcacgaaggccccgtcctgctgctcaatggggaactttcggagccgcaagctctgcatgccgtctggtgcctggcaggaggtggcagaggtgggagcagtaagcaggggaccaggcagggaacgtgtccagccccagccccagcccccagccctgggctcacctggctacgctgggccactgtgaggatcaggcggtaggggtggctggtgctccagtgaatgaggtacaggccgtcctcgggccgcagcttggcctgcacaaatggctccctggaaggtggtccagggggactatcaggccacctggggccactctggacccatacccgggaacaatgacactcattacctacttagagggcacacacacagctaggacaagtgtcagacacagccactcttgtggggacactaactctggacacacagccacttacatggagacacaatgcagcagcaggcacacacctgcttttttgtttatttgtttgtattttttagacggattttccctcgtcacccaggctggaatgcaatggcgtgatctcagcttattgcaacctctgcccacctgggttcaagcaattctcttgcctcaacacctcaacctcccgagtagctgggattacaggtccctgccaccatgcccagctaatttttatatttttagtacagagggggtttcaccatgttagccagcctggtctcaaattcctgacctcagctgatctgccagcctcagcctcccaaagtgctgggattacaggcatgagccactgtgcccggctacctgatctctcttttttttttttttttttttgagacagggtcttgctctgttgcccaggctggagtgcagcggtgcaatcttggctcacttcagcctggacctcccaggctcaagagattctcccacctcagcctcctgaggagccaggattacaggtgtgcccagctaatttttgtgttttctgtagttaaaagaccttgctacattgcccaggctgctcttgaactcctgggctcaagtgattctcccacctcggcctcctaaagcgctgggattacaggtgtgagccaccacacccagcctactcctactcttgtacttgacgccagacgggccctgacaaggtgacacacactccaagattggaaacagccatcaggagccggatgggcacacacccagccatgaccatcgccactcacaagggtgacacacggtggatggccaatcacacaagcaaaggacaacgatcccagacacaactaatcacccaatatgacagggcaacataggggccagggcatcccagacacagaggtgacacaaacatgcactataaagtgtcatggtcacataggtccagacacctacatgtgcagtggctgacacacgtggtccccaaacacctgtctgtacgggggcagcacacatatagccttgacagcaggcacggccacaggcctcacaaggtgaaatggccacttccccctcccctggcatcacaggtaggacaagggacagagagtcacagggccagtgaccagacaaagagacagtcacaaatcacgacttggcagcacacaggacagccacacactcccctgcacctgatgatgacataagtaccgacaacttcacgccctcaggcccacaagtcacacacaggaccccgctgagatggtgactcacaagttaccagcacaggcagccgcctgcagaggtggaagcatccaacatacgcctgaatggtcaccagcgtcagggtaacacacagtcccatgaaaatcaccagttctgtgcaatgacaacctcaacacacaatgacagtcatggccgggcgtggtggctcatgcctgtaataccagcactttgggaggccgaggcgggtggatcacctgaggtcaggagttcaagactaggttggccaatctgatgaaaccccatctctacaaaaatacaaaaattagcctggcatggtggcgagtgcctgtagtcccaggtagtcagttgggaggctgaggcaggagaatcgcttgaacccgggaggcggaggctgcagtgagctgagatcatgccactgcactccagtttgggcgacaaaaaataaaaaaaaaataagacgtgcacctacacacacaccctgcacagcccctagggctcacagtctagttggcacccttggcggtggcccccagcgccccccacccagcactcacagcaggggtccgtggatcccatcccggatgctcatcaccagccgtgggggagccacctcgtggcacaggtagtggctggagtcggccgtcaggcggaaatagccgtccaccagcgacacgaaggacagcgccgcagcccgggaaggcaagctcagctcctgccagccaggggcgcatcaggtgggtgtcctcccaggccatgatgggccctagcccagcccctaccctgggcctcaccaggcacttgttgtcctgccggtggatgctgacacagtgctctttcagcaccacgtgggtgatgtcccggaagtcacagaagtaggcccacagtggctcccgcggcctgtctgccggctggccgactgccttgtgagccttggccttcttcccaaacaggctggcttgggggttcctgccactgctgccactagaaccctgaacacccagcaagtggggcagaggatggagagggcaatgcccgtttatacctcctgcactttcccctggggagagactggagccagaagggccaggcaccaacctaggttgacctcccaagtcccagtgtcacaggtgggatggggacccaccccaaaatcatacacatgctggaagccggacccttagggaaggcagagagaagaatcctgaccccctcacacccaggtgccagtccccagatgaaggggttccctggaggtgcagaccccagaaataaggtccccagggggtaagcagatggaggaccttctccaagaaactggccctagcggacaggtgccccagagccatgtggggagagggctcaggtcagccaccctcagaggctagggtcaaggatgaacacagaaacccaccccagcccaacctgaacccccagggcggaaggggcgccttgctcacctcctccttgttcacctcctcctctactggccaccactggatgccaccagtgcctgtcaccagcacctcgtgggttgggggcccagcagcagactcagggccagggtctgtaggggccaccccactgtcccggatgtagcagggctccccctcggcctgggccagcagcctcaggtggcacacgggcacacgctctgtgccgaagcggggtgccagccgctcgagtgtggctaggtatttgaccatgaccatctgctgggagagtcggcccggctggaagtcccgcaggaacctgcggaagacgttccgaaggcgcagccgggtcagggcgctgtgctgccggatatgccggcggaaggagcgcgggatgcagtccttgaagctggggggaaacacagtgaggggctggtcagggacctgggttgcaggcccagctgggtgacacagggcaagtggcttaacctctttgagcctcagctgcctcatctggaaaacaggcacactagccaggtgtggtgacttgagcctgtagtctcagctacttgggaagccaaggcggaaggatcgcttgaggtcaggagttcgagaccagcctggccaacatgatgaaactcagtctgtctctactaaaaatacaaaaattagctgggcttgatggtgggcacctgtaatcccagctactcaggaggctgaggaaggagaatctcttgaacctgggacgcagaggttgcagtgagccaagattgcgccactgtactccagcctaggtgacagagagagactccggctcagaaaaaaaaaaaagtagaggcacggcaatatgcaaagtctaccctggctcccagatgctcaggacatttccccctgcctacacagcgtccccaccccattcccagacacctggtcttcttggccacctcctccagggggatgccatggcggagagcgaggtgacagaggtgcagaaaggccatgcccaggctctcattcttaaagtggtggatctcctcctcggtcgacagctcccacagtgatgccacgtcattcacaaactcatgcttgccctgggaacaggaaattgagcagaaagggaggtgtgagaatgcgttcctctctagcccagaggtatccaatcttctggctaccctggaccacactggaagaagtgtcttgggccctacataaaatacactaacactaatgatagctgatgagctaaaaaaaaaaaaaaaaaaagaatatcgcaagccgggcatggtggctcacgcctataatcccagcactttgggaggccaaggcgggcgggtcacctgaggtcaggagtttgagaccagcctgaccaacatggagaaaactcgcctatactaaaaatacaaaattagccaggtgtggtggcgcatgtctgtaatcccagctactccggaggctgaggcaggagaatcacttgaacctgggaggcagaggttgcagtgagctgagatcatgacattgcactccagcctgagcaacaagaatgaaactctgtctcaaaaaaaaaaaaaaatcacagcaaaatctcagaatattttaagatagtttatgaatttgtgttgggcttcattcaaagctgtcctgggcagcatgcagtccgcaggccaggggttggacaagcttactctagccagagaactctaatttcctgcgtcttaccaccttgaggaggggagagaccaccatttactggaaaggccaaatacacagcatacacccctcctcttgtcaatcttgtgcctgtggcagacattactaatcaatcacagcactctatccccttcaacctgaactcttggctgggcatggtggctcacacctataatcccacaatttaggaggctgaggcaggtgaatcacttgaggtcaggagtttgagaccagcctggccaacatggtgaaaccccgtctttactaaaaatagaaaaattagcctggggtggtggcgggcttctgtaatctcagttacttgggaggctgaggtggaagaatcgcttcaacctgggaggtggaagttgcagtgagctgagatcacgccactgcactccagcctgggccacagagcaagactccatttcaaaaaaaaaagatcggctgggagcggtggctcacgcctgtaatcccagcactttgggaggccgaggcgggcagatcacgaggtcaggagatggagaccatcctagctaacactgtgaaaccccgtctccactaaaaatacaaaaaattagctgggcatggtggcgggcgcctgtagtcccagctacttgggaggctgaggcaggaaaatgacgggaacctgggaggcggagcttgcagtgagccgagatcacatcactgcacttcagcctgggcgacagagcaagactccgtctcaaaaaaaaaaaaaagatccccagatagcatgagttgaaacctattagctatattgaatcagggagggaaatgggggctcctcaactgcccctaagtctcccacaaatagtcttgccaccccagccctgctcatacctgctcaaagaggtactcaaatgaggctgggtccaggagttgcatcccctgtgctgtctgatctgaggatgcctcggttcctgggggcccacaacggtacacagccggttcccgaggattcatgccatgccagttccggaaataaaacctgcaggaaggagggacgcagctggggcttagcacagagtcagaccagcttcagcacaggaggggacgagctttgcaaaggtctccacccaccttatgcggaaatatagcatcaggcttgcatctctggggatctctaggatgtggtttgggggcaaccagacttgggcctgagcatcgaagagggcaaagagattgaagcaaggaggagtgatacctggatcaggtgagaaacgaggtcaggagtcacgtcatttgctaccgtcagccccaaagaccccccagacccaatgtctgccttcacactccctctgaggccccctcccccacctgcagcttcagtctcacgttgcccctgggcagaggacagtgcgtatgttgcccatgctgtggcctcacaggaggactacatttcccagcctcccttgcagctaggatggagccaattgcactgctggtttctggccaaagggctgggtacatttccaagcctggaaataaattctcttgccaccttcaccacccgaggtatgatgaaggcttcttgtgacagatggtgaagctgtaagacagaggtgaaccatccaacctgtacttgattttaagtaaaactttttttttttttttgagatggagtcttgctgttgcccaggctggagagcagtgacacgatcttggctcgctgcaacttccgcctcctgggttcaagtgattctcctgtctcagcctcctgagttgctgggattacaggtgtgcgccaccaaccccggctagtttttgtatttttagaagagacgaggtttcgccatgttggccaggctggtctcaaactcctgacctcaggtgatctgcccaccttggccccccaaagtgctgagattacaggcatgagccactgtgctcggccgattttaggtaaaccttgattaagatttggggggattgcttattcctgcagcaaaactaatcctagcctgacccacataactctacaaactgctgcaattgtctggcgtctccctgaactccagccccaaagaaacatccagtcacctcctggctgtctccccctggacatcacaggcccccccttagatatggcttgttccaaacaacatatcttatctgtggttggcaaactccaaccttcccttcctctgcccttttttttttaagggtcagggtctttctttgccacccaggttgcagtgcagtggtgcaatcctagctcactgcagcctcaacctccagggctcaagcgatcctcccacctcaatctctggagttgatgggattatggctatgagccagggtgtgtggcttctgcccagttcttcaaaccaggaacttggtccttatcttcaacctctcccacctgctccaaaacagatcggtcaccaagacctgctcttcctgcaccctccatgtcctggggctccatccaccaccttcaaatgcaaacctcaaccccaatccagtctccagacttgctgtaatttcccacaccagctacccagggtatctttcttctactgatgtcatttaaaaattgtacctgtcggccgggcgcagtggctcacgcctataatcccagcactttgggaggctgaggtgggcagaccacgaggtcaggagatcaagaccatcttggctaacatggtgaaaccccgtctctactaaaaaatacaaaaaattagccaggcatggtggcggatgcctgtagtcccagctacttgggaggctgaggcaagagaatggtgtgaattcaggaggtggaacttgcagtgagccgagattgcgccactgcactccagcctgggcgacagagcgagactctgtctcaaacaacacaacaaaacaaaacaaagaatcagccatggccaggctcgagggtgcacacttgtaatcccaacactttgggagtctgaggcaggtggatcacttgaggtcaggagttcgagaccagcgtggccagcatggtgaaatcccatctctattaaaaaaaaaaatagctggacctggtggcatgtgcctgtaattccagctacttgggaggctgaggcaggaggactgcttgaacccgggaggcggaggttgcagtgagccaagatcgtgccactgagctccagcctgggcggcagagtgagatctgaaaaaaaaaaattggctggccatggtggggtgcacctttagtcccagctactccggaggttgacgcaggacaatcgcttgaacccgggaggtggagggtgcagtgagccgagattgtgccactgcactccagcctggcgacacagcaagactgtctcaaaaaaaaaaaaaaaaatggtatctggctgggtgcagtggcccatgcctatagtcccagcactttcggaagctgaggcaggtgaagcacttgagggcaggagtttgagaccagcctggccaccagagcaaaacctcgtctctactaaaaatacaaaaattagctgggtgtgggggtgagcacctgtaatcgcagctactcagcaggctgaggcaagagaattgcttgaacctggaggcagaggttgcagtgagccgagatcacgccactgcgctccagcctgggtgaaagagtgaggctctgtctaaaaaaataataataaaatgaaataaataattttatctaaagctgggtatggtggctcacatctgtaatcccagcactttgggaggctaaggcgggagaatcacttgaacctaggagttcaagaccagcctaagcaacatagtgagacccctcatctctaaaaaaactaaaaataaaataaattagccaggtgtggctggagtgcagtggtgtgatcatggctcactgcaccctcgacttactgggctaaagcaatcctcctgcctcagcctcccaaggagctgggactacaggcgcacgccaccatgcccagctgatttttgtagtttttgtagagaaggggtctcaccatgttgtccaggctggtctcaaactcctaggctcaagtgatcctcccacctcagcctcctgagtagctgggaggctgagctactcagcctccaaagtgctgggattacaggcataagccagtgtgctctgccctgaagtagtgtttataattttcatatcctctacaatctagccttaaatgttatgaactgtggctgggcacagtggctcacgcctgtaatcccagcactttgggaggctgagggaggcggatcacctgaggtcgggagttcgagaccagcctgaccaaaatggagaaaccccgtctctactaaaaatacaaaattagctgggcgtggtggcgcatgcctgtaatcccagctactcgggaggctgaggcaggagaattgaacctgggaggtggaggttgcggtgagctgagatcgtgctattgcactccaacctgggcaacaggagcgaaactctgtctcaaaaaaaaaaaagttatgaactgtaaatgtgtggtattatactgcagacgtccctctgcaatgtgctttttcaggctacgagaggttataaagcttcatgcagaatgacatgagtaattctggttaaattccttctcccggctgcgcagtagtccagtattcaaccagattgcaatttacttaggcagtctcttattgagggactttgcaatggtctccccttttccatatgataaacaaggcggctctaaacattctcataagtgtccctgggagcacatgagctgactgtttatagagtgactgtcactgtccaggagtggaactatatggcctcagggaagatgtttctgagtttttgtttttttttttgagacggagtctcgatctgtcgcccaggctggagtgtggtggctcaatctccgctcactgcaagctctgcctcctgggttcacgccattctcctgcctcagcctcccgagtagctgggactacaggcgcccgccaccatgcccagctaatttttttgtatttttttagtagagacggggtttcaccgtgttagccaggacggtcgcaatctcctgacctcatgattcgcccacctcagcctcccaaagtgctgggattacaggcgtgagccacggcgcccggcctgggtttttttttttttttgaagcaggatcttgctctgacatataggctggaatacagtggtgcaatcatggctcagtgcagccatgacctccctggctcaagcagtcctcctgcctcagtctcctgagtagctgggaaatacaggaacacgccaccacacacagctatatatatatatatatatatatatatttttttttttttttttttttttgagacagcatcttgctctgtcacctaggctgaagggcagtggcatgatcactgtagcttcaacctcccgggctcaagtgatcctcccacctcagcctcctgagtagctgggactacaggtgcacaccagcacacagcacacctggctaattttttgtatttttagtagagacggggtttcgcgatgttgcccaggctgatcttgaactcctgggctcaagtgatcctccacgcttagcctccaaaactgctgggattgcaggcgtgagccactgcatccagctttgactgtgttatcaaatcactctccaaagtcacaccatggaattatactgcccctctgtgaagggaggatacctccctgtgaaacaatatatattttttttagatggagtcacccagactggagtgcaatgttgcaatcttggttcaccgcaacttctgcctttcaggttcaagtcattctcctgtctcagcctcctgagtagctgggactacaggcatgtgccaccatgcccagctaattttttgtattttttttttttttggatagagtttttgctcttgttgcccaggctggagtgcagtggcgtgatctcggctcactgtaacctccaccccctgggttcaagcgattctcctgcctcagcctcctgagtagctgggattacaggcgcccgccaccacgcccggctaattttttgtattttcagtagagatggggtttcatcatgttgaccagactggtctccaactcctgacctcaagtgatccacccgccttggcctccctaagcgcaaggattacaagtgtgagctacggcacctggccaatgtttcatatttttgttttttgagaccgagtctctgtcacccaggctggagtgcagtggtgcgatctcggctcactgcaactccgcctcccaggtttaagtgattctcctgcctcagcctcccaagtagctgggatgtgcgtcaccacgcccagctaatttttatatttttagtagagacggggtttcaccatgttggccatgctggtctcaaactcctaacctcaagtgatctgcccgcctcagcctcccaaagtgctgggattacaggcgtgacccactgtgcctggcttgagacaacttcttaaagaaccagtcaaaaataaaaaataaaaataaaagaactagtcagactgcttcactctctggcttaaaccttccatggctccccattgctcccggagaatgcccaaccccttgacccttgattctgagtacccccaccctggcttttgcctgctatgccccaatttcaattgttacttccccttccaaactctcaaaattgataccccagtcaccctgaaggtctttcgcttcctcaaacagatcaagctctccgggcctccatgcatgctgttccctctgctgagcgtgtttcacatcacccgcacacctgtctgaatcctttaataatcagtcatgggggcgggcacagtggctcacacctgtaatcccagcactttgggaggctgaggtgggcggatcacgaggtcaggagatcgagaccatcctggctagcacagtgaaaccctgtctctactaaaaatacaaaaaattagccaggcgtggtggtgggtgcctatagtcccagctcctcgggaggctgaggcaggagaatggcgtgaacccggaaggcggagcttgcagtgagctgagatcgcgccactgcactccagcctgggcgacagagcgagactctgtctcaaacaacacaacaaaacaaaacaaagaatcagccatggccaggctcgagggtgcacacttgtaatcccaacactttgggagtctgaggcaggtggatcacttgaggtcaggagttcgagaccagcctggccaacatggtgaaacccccgtctctactgaaaatacaaaaattagccaggtgtggtggtgggcgcctgtaatcccagctactcaggaggctgaggcaggagaatcacttgaacccgggaggcggaggttgcagtgagccgagatcacaccactgcactccagcctgggtgacagagcgagactccgtctcaaaaaaaaaaaaaaaaaaaaaagccgggcacggtggctcacacctgtcatcccagcactttgagaggccgaggcagggggaacagcatgcatgttcaagaccagcctgaccaacatggtgaaaccccgtctctactaaaaatacaaaaattagctgggcgtggtggcaggcgcctgtaatcccagctactcaggaggctgaggcaggaggatcgctagaacccgggaggcggaggttgcagtgagccaagattgtgccattgcactccagctttgaggactgagcgagacttcgtttcaaaaaaaaaaaaaaaatcagtcatggccaggcgcgatggctcatgcctcccaacactttgggaagccaaggcgggtggatggcttgagcccaggagtttgagaccagcatgaggcaacatgcaaaaaatacaaaaattatccgggtgtggtgacatgtgcctgtagccccagctatttgggagactgaggcaggaaaatcacttgagcctgggcagttagaggctgcaatgcgtcatgattgcaccactgcatttcagcctgggcaagagagagactgtctctacgaaagaaaaaaaaaaaaagactcagccatcaatggggaagtaggaagtgttataaaaattgattacaatgcccccatccagtcatggaaagctgggaatgggggaggtaagaggagtttctggaggaaggtatatgtaaccaaagccgccttagaaaggcctttccttggttgggcatggtggctcacgcctgtaatcccagcactttgggaggctgaggcaggtggatcacttgaggtcagaagttcgagaccagcctggccaacatggcaaaactccagctctactaaaaatataaaaactagccgggcgtggggtgtgcacctgtaattccagctactcaggcggctgaggcaggagaatggcttgaacctgggacatggaggttgcagtgagctgaggtcacaccactgcactccagcctgggtgacagagtgagaccctatgtcattaaaaaaagaaaattgggccgggcatggtggctcacacctgtaatcccagcactttggagggccgaggcgggcagatcacgaggtcaggagatcaagaccatcctggctaacacggtgaaaccccacctctactaaaaatacaaaaaaaaaaaaaaaatctagccgggcatggtggcacacacctgtagtcccagctactcgggaggctgaggccggagaatcgcttgaacccgggaggcggaggttgcagttagctgagattgcgccattgcacttcagcctgggacagagcgagactccatctcaaaaaaaagaaaaaaagaaagactgtagtagatatatttggaagtgcaatttcctgtgcaggaggagggaaagcctttctttcttttttttttttttttttctttgagatggagtttcgctcttgttgcccaggctggagtacaatggcacgatctcagctcactgcagcctccacctcccaagttcaagcaattctcctgcctcagcctcctgagtagctaggattgcaggcacctgccaccatgcctggctacattttgtatttttagtagagatgcggtttcactacattggccaggctggtcttgaactcctgatctcaggtgatctgcccgcctcagcctctgaaagtgttgggattacaggcatgagccaccgcacctggcctttttttatttttgaaacggagtctagctctgtcacccagcctggagtgcagtgctgtgatctcggctcactgcaacctccatgtcccaggttcaagctattctcctgcctcagccttctgagtagctgggattgcaggcacctgccaccatgcctggctacattttgtatttttagtagagatgcggtttcactacattggccaggctggtcttgaactcctgatctcaggtgatctgcccgcctcagcctctgaaagtgttgggattacaggcatgagccaccgcacctggcctttttttatttttgaaacggagtctagctctgtcacccagcctggagtgcagtgctgtgatctcggctcactgcaacctccatgtcccaggttcaagctattctcctgcctcagcctcctgagtagctggaattacaggtgcgcaccccacgcccggctagtttttgtatttttagtagagctggagttttgccatgttggccaggctgctctcaaacttctgacctcaagtgatccaccagcctcagcctcccaaagtgctgggattacaggcatgagccaccgcgcccggcctgactttctttttttaatgacactgggtctcactctgtcacccaggctggagtgcagtgacgaaaccatacctcattgcaggcttgaactcctgggctcaagcgatcctcttgcctcaggctctcaagttgctgggactacaggcatgtaccaccatgcctggctaatttctaaaaattattttgttgagacaaggtctccctatgttgcccaggctggtctccaactactggcctcaagcaatcctcctgcctgggcctcctcaagtactgggattacaagtgtcagctactgcacctggccaagttttctgatttattatatttcttgctgtcctccctactaaaatttcagctctacaaaggcagtgatttgcagctgccacacagtagatgcttacaaaatgttcaccgaatgaacgggtggatggatggatggatggatggatggatggatggatggatggatggatagatggatgaataggtgggtgggtgggtggatggatggatggatggatggatggatggatggatggatagatggatgaatgggtgggaggatggatgggtgggtggatggatggatgcatggataggtgggtgagtgggtgagtgggtgggtggatggatggatggatggatgggtgggtgggtggatggatgggtgggtgggtggatggatggatggatgaatggatggatgggtggatggatgggtggatgggtgggtggatggatgggtggatggatgaatgggtgggtatggatggatcgatgggtggatggatggatagatggatgaatgggtgggtggatggatgggtggatgggtgggtgggtggataggtgggtggatgggtgggtgagtaggtggatggataggtggataggtgggtggatggatgagtgggtgggtggatgtatggatggatgcgtgggtggatggatgggtgggtgggtgggtggatggatgcgtgggtggatggatgggtgggtgggtgggtggatgaatgggtggatgggtggatgggtgaaagggtgggtggatgggtgaatgggtgggtgaatgggtgggtggatgggtggatgggaggatggatggatgcatgggtggatggatgggtgggtgggtggatggatgggtggttgggagggtggatgggtgggtggatgggtggatggatggatggatggatgagtgggtggatgggtgggtggatgggtgggtgggtggatagacggatggatggggcccagctgctgcttgcacacccaccccagtccccatggtgccaacgccccagactcaccaactttatgtgcaatgtggatgcagacttcctcagctgtcagcgatgactcactgaaagtgacccagggctccccgccgcctggaccagcccagtgcagaagcaccttcaggcctcccatggcagccatgggctgggctccatccccaacgggcttactgcccctggccatcccccagtggcgcagaggcatgctcccggcaggtggctcagctggaaaggggacaatctgtcagctcccaagtctcagcccagagacccctgttagctcttcaaccttccacccaccccagctaaggcctgaggggaagattctgggctcccatcttggcatgacattagagacccgattccctctctgagtctcgttttccacatttattggacagggttggggtatgcatccccacctagatctctcatcaacaataacactgaaccctcctctctttccacaaattgacacagatataaaaatctgctctggccaggtacagtggctcacgcctctaatcccaggactttgggatgttgaggcaagaggattgcttgagcccaggagctcgagaccagcctaggccatatagcaagaccctgtttctacaagacgttttattttatatcttatcttatcttatcttatcttatcttatcttatcttatcttatttttgagacagagtttcactcttgttgcccaggctggagtgcaatggtacaatcttgctcaccacaacctctgcctcctgggtttaagtgattctcctgcctcagcctcctgagtagctggcgcctgccaccacaccgggctaatttttgtatttttagtagagacagggttttgccatgttggccaggctggtcttgaacctctgacctcaggtgatccacccgcctcggcctcccaaagtgctgggattacaggcgtgagccactgtgcccggcctctacaagaaatttttaaaatttagccaggcgtgggggtgcacatctgtactccaagctactcgggaggctgaagtgggaggatctcctgagcccaggagttggaggctgcagtgagcagtgatcgcaccactgcattccagcctgggtgacagagtgagaccctgactctaaaaatataaataaataaataaataaataagtaataaaaatatataaaaagggccaggcgcggtggctcatgactgtaatcccagcactttgggaggccaaggcggacagatcacgaggtctggagattgagaccatcttgaccaacatggtgaaaccccatctctactaaaatacaataaataaataaataaataaataaataaataaataaaaagtaaaataaaaatctgctcttaacacacctccccaaaataaccagacaggcagatgtggtcaaacatacctgagggtgagtcctggagctccctgtgtcaactcaagcaagccacttagcaattctgggcctcagtttccccatctggaaaagggaggtcctcagggtgttgccatcaaaagatggttgtaatgtttcaatatagttccgcatattacacattcagcacagaccctgattcaggcacacacaaaaagaacaaatatgaccaaaacaagaataacataattgttattagtttcatcgtggtgatggcctctttcaggccacaattctcctctcccacatttacccccatgagtgacctcagtccctgttgactccccaaagcctaggagagtttatgtccagctccatccccccaatccagggcctgagcctcctgagggcgccagtatggaagtggaggggctgtcacttccacccatgttgctggtttcctcatctggaaaatgggcatgtaacagtgtctacctcaaaaggctgctgggaggatttaacgcgaggaggcagagaaagtgcctggtatacagtaagcgcttaattagcctttgccattaatacctattcatgttatagatgagatcccggggatggggctttcgcggagcctacttcctccttcctcctttctcgtccccactggacccagacccagctttgaagacagggtcggagtgaagtttgcaactgggaaggctgcacgcccccatgtcctccccccaaaacctctaaacccggccggcaacggcgggaactgggatgtgcacccaccgggcatcggagcagtcccgaggcaccaggtgctcccatccaagtgcagcctgtcaagcgcagccagtccccgcggcttcttcctgaggacctccggccgcgctccttccgcgcccgcgtccagactcacccttccgggggaacacaagctcgaacccggacccctccccgctcccgcgggtagctactgcttgtcccccgccgagacgcctcctcccattggccgcctgaaacgcacacgcccattggcagctgctctgttctccctgctcgtcaccattggatttttttttttttgccatggtggcggcactctcattggtcctggggctcattcgtcactcagccgcgattggctgagtcggcacccagatgcgctgtcgcttctgctattggctggcactcggtggacggagacgggggaggggcttgcgagaggcgggagggagagcgaagtgtgtgggcaacgcggccggatcctggagttcccctccgtgctgtggaattgggtcaggcgtgtacggtcctgaccctaggacacagctgcatgtcctcacctcggtgttcaaagctgcaccggccaccattcaaccctccgacgccctgccctttggcttccccgttccatccggtcctgtctcctttccctcgtttctacctggccgactccatcctgctgactagaattccccctccttcactcctgggaggcattcctcgcccacctgccccagtcctcttcctgatcacctgcagccctgtcctctgaagctccctagcggtcagggtagcagcttggacatcccgccagacgtgaattcaaatccccactccgcaagtcgtgcccatttgctgagaagcctacagccagagcgtttcacatacattatctcatttgatcctagcagcaattccctgtatggcggctcttattatccccatttcacagaggaagaaactcaggcatgaagaggtaacaaagaccgtcctctgacccttcttctgtgccacaccataaccactcctcgactttgtctttcacctgcccagccaagtcttagcaaagaagcctattaagtcatccgctcatccttgatgtctgatcaacttcctcatcttccacttttttttttttttttttttaagatggagtttcgctcttgtcgcccaggctggagtgcaatgctgcgatctcggctcactgcaacctcagactcccggattcaagcgattctcctgcctcagcctcctgggtagctgggacaacaggcgcccgccaccacgcccggctaatttttgtatttttagtagagatgggatttcaccatcttggccaggctggtctcgaactcctgacctcgtgatccaccctcccaaagcgctgggattacaggcgtgagccaccgcacccggcccttttgttgttaatttttaaattttgtggctaatttttaaatttttgtagagatggggtctggctatgttgcccaggctggtcttgaacttctggcctcaagcaatcatcctgccttggctttccaaagtgctgggattacagatgtgagctaagacacccagctccatggagttggtcttaactgccatggccaagggacatgtggctgcttctctctgagtcagaaaatatgggtaaaaagcctcctcacagggcagctgtggacattcagtatgaaaatgctgaaagagatcgggaatggtctctttcacacctgtaatcccagcactttgggaggtggaggcgggcggatcacctgaggtcaggagttcaagaccagactggccaacatggtgaaaccctgtctctactaaaaatgcaaaaattagctgggcatggtggtgggcacctgtaatcccagctattcaggaggctgaggcaggagaatcgcttgaacttgggaggcagaagttgcagtgagccgagatcacaccattgcccttcagcctgggcaacaagagctaaactctgtctcaaaaaaaaaaaaagaaaaagaaaaagaaagaaaatgctgatagaggccgggcacagtggctcacgcctgtaatcccagcactttgggaggccgaggtgggcggatcatgaggtcaggaaatcgagaccatcctggctaaggcggtgaaaccccgtctctactaaaaatacaaacaattagctgggcgtagtggcagcctgaggcaggagaatggcgtgaaccggggaggcggagcttgcagtgagccgagattgcgccactgcactccagcctgggcgccagagtgagactctgtctcaaaaataaaataaaataaaataaaataaaatgctgatagagacttgtcctggctggatgcagtggctcatccctataaacctagcacttcagggagctaaagaaggagtactgtctgggcccagttcaagaccaacctgggcaatatagcaagaccccatctctacccaaaataaaaaaaattagtctaaggctgaagtatgagaatcgcttgagcccaggaggtggaggttgcagtgggctgagatcccaccactgcactccagcttgggctacagagtgagactccatctcggggggaaaaaaaattagttagtcccagctactccgaaggctgaggtgggaggattgcttgagcccaggaggttgaggctacagtgagccgtgatcacaccactgcactccagcctgggcaacttgacctcctgggctctgctgtattttcttcagagtccttattgcaacctgacatttcatgggaagtttctttctttttttttttttttaaagagacagagtcttgctctgttgcccaggctggagtgcagtggcgcaatcttggctcactgcaacctctgcctctcaggttcaagcaattctcctgcgtcagcatccccggtagctgggattacaggcgtgcaccaccacgcctggctaatttttgtatttttaatagagacagggtttggccaggttggccatactggtctcgagctcctgacctcaggtgatccacccgccttggcctcccaaagtgctgggattacagatgtgagccaccgcgcccagctgggtttctcttctttctttctttcttttttttttttttttttttttttttgagacaagaatctcgctctgttgcccaggctggagtgcagtgctgtgatctcaattcactgcagtctcaacttcccagattcaccattcacaatcttccacctcagcctcctgagtagctgggactacagatgtgcatcacgatgcctgggtaacttttttttttttgaggcggagtcttgctctgttgctaggctgaagtgcagtggcacgatctcggctcactgtaatccctgcctcccaggttctagcgattcttctgcctcagcctccagagaagctgggattacaggcgtgtgccaccacacccagctaatttttttgtattttttagtagagatggggtttcaccatgttggccaggatggcctcaatctcctgacctcatgatcctcacgcctcggcctcccaaagtgctgggattacagaagtgagccaccgcgcccagccgcctggctaacttttgtgtgtgtgtattttttatagaaatgggcttccaccaaccccgtctctactaaaaatacaaaaattagccgggtgtgttggtgggtgcctataatcccagctacttgggaagctgaggcaggtgaatcacttgaacctgggaggcggagtttgcagtgagctgagatcgcgccactgcactctagcctgggcgacagagtgagactctatctcaaaaaaaaaaaaaggaaaagaaatgggttttcaccatgttgcccaggctggtctcaaactactgggctcaagtggtcctcccgccttgacctcccaaactgctgggattacaggcgcatgccaccacacccggctaattttttagtattttttagtagggacgaggtttcaccatgtgggccaggatggccttgatctcctgacctcgtgatcctcccgccttggcctcccaaagtgctgggaataccggtgtgagccacctcgcctggccggctggctaacttttgtgtgtgtgtaatttttttagaaatgggttttcactatgttgcccaggctggtctcaaactactgggctcaaactgctgggctcaagtggacctctggccttgacctcccaaactgctgggattacaggcatgagccaccgtgcccagcccctgggaagtttctttgagcacaagttctattgcctgtctgcggttctaggaccgcaccagaaagaggtccgtctggttgtctgctaagccctcagtgcctgagattgtgcatccagcccagtaggtggcttaagaagccacagctggaggggaatgaatggcctgggagccaggaatccctggctgttgtcctgcctgctgcgggagggctggctgtgagcttcctctctgtcgccgcttagagtacagtacctagaagccaagagtgccagatttttctttttccttttttcttttattgagagagggagtttcgctcttgttgcccaggctggagtgcaatggcacaatctcggctcaccacaacctctgcctcctgggttaaagcgattctcctgcctcagcctcccaagtagctgggattacaggcatgcgccaccacgcccggctacttttttgtatttttagtagagatggggtttctccatgttggtcaggctggtcttgaactgccgacctcaggtgatccacccacctcggcctcccaaagtgctgggtaatactggtgtgagacaccgtgcccggcctagagagtgccagatttttcaacagccattggggcaatgctccgtgattagatgctagaacacagtgggccgagtgggcctgggacccggtattccccgctcccaaaggaactagaaggaaatgccacatgaggcgattaataataacaatgctagtcatactcccagtaacgatatcaattctaacaatgagctggtgcggtggctggcacctgtaatcccagcactttgagagacagaggcaggaggatcgcttgaacccaggagtcccagaccagcctgggcaacatagtgaaacctcgtgtctacaaaaaaaatttaaaaattagctgggcatggtgatacacgcctgtagtcccagctactagggaggctggggtgggaggatcgcttgagtccacaggttgaggttgcagtgagctgtgatcgcaccactgcactccagcctgggcaaccgagcaagaccctatcaaataaataaataaataaataaataaataaataaataaataaagctgacattttcccagcctgcacactggggccgagcgtgggtatttagccatctctgggtcttctcagtttctttcttttttttttttttttgagatggagtctcactctgttgcccaggctggagtgcagcggcgtgatctcggctcattgcaagctccacctcccaggttcatgccattctcctgcttcagcctcccgagtagctgggactacaggtgcccgccaccacacccggctaattttttgtatttttagtagagacggggtttcaccagggttagccaggatggtctcgatctcctgacctcgtgatccgcccgcctcggcctcccacagtgctgggattccaggcaccagccactgcacctggcctcttctcagtttctttgcaagtggtatcagcacccccacttgacaattgaagaaaagaggctaaggaggctgttttgccaaggcctggcgcctcctgcccaaactcagacctggtccataagggaggccccagaccccacatgtgactaacaggagggggtttcccaggactgagggggttccccaatggggggctttccatgctaaaattgggacagtcctgggcaggccaggacagttggccacgccactacggcgggtttctcagaaggaacaaaagctgggggcttcccctggctctgcaagggctgcagggaggggcctcctcagagccccctgggacctgggaaaagccaagagttgatggattaaaagtaaaatacctttgtgttttcatgagtgagaaagttcagggaacagccagtctcctcctcaaaacaaccatgagatggatttcctgggaaatcttttttttttgagacagagtttttcctcttgtcgcccaggctggagtacaatggcacgatcttggctcactgcaacctctgcctcctgggttcaagggattctcctgcctcagcctcccgagtagctgggattagaggcgcctgccaccacgcccagctaatttttgtattttttgtagacacggggtttcaccatcttggccaggctggtctcgaactcctgacctcaggtgatccacccgccttggcctcccaaagtgctgggattacaggcatgaggctaccgcactcagcctcctgggaatctttccacaaaaattctacgctcctttgggcacgtgtgtgaacctgtgttctctagaaaattctcaggagcagccccaaatgggacactcggtgctggcctgagaggatacagaggagtaacttacacacatgaaggctggcaccagacgggctgagttcaagccccagctccatcactgtgtgatcctgggcggccccttaaccccactgtgcctcagtttcctcctctgcaagatgtgactatttagtcccaaacccagaggcatgtcagggacatcaaatgagttaatacacttcattagccaggtgtggtggtgcatgcctgtacaggaggctgaggcaggagaatcgcttgaacctgggagatggaggttgcagtgagccgagatcgtgccactgcatttaagcttgggcaacagagcaagactcggtctcaaaaaaaaaataaataaaaggactggtggtggatagccagatgcagtgtgtgtctcttggctgtaatttgagctactcaggaggttgaggcaggagaatcacttgagcccagaggttagaggctgcagtgagctatgattgtgccactgcactccagcctgggtgacagagccagatcccatctcttaaaaaaaaaaaaggggggggccacacatggtggctcatgtgtgtaatcccagcacttcggaaggccaaggcgggcagtcctcttgaggtcaggagtttgagaccaacctggccaacatagtgaaaccctgtgtctacaaaaaatacaaaaattaggccgggtgcggtagctcacgcctgtaatcccagtactttgggaggctgaggcaggtggatcatgaggtcaggaaatcaaacccatcctggctaacacagcgaaaccccgtctctactaaaaatacataaaaattagccgggcgtggtgccagacgcctgtagtcccagctactcaggaggctgaggcaggagaatggcgtgagctcgggaggcagagcttgcagtgagctgagatcaggccactgcactccagcctgggcgacagagcaagactccatctcacaaaaaaaaaaaaaaaaaaaaaaaaaaagggccgggcacagtggctcacacctgtaatcccagcactttgggaggccgaggagggcagatcacgagatcaggagatcgagaccacggtgaaaccccgtgtctactaaaaatacaaaaaattagccgggtgtggtggcgggcgcctgtagtcccagctactcgggaggctgaggcaggagaatggcgtgaaccccggaggtggagcttgcagtgagccgagatcatgccactgcactccagcctgggcgacagagtgagactctgtctcaaaaaaaaaaaaaaaaaaaagccaggtgtggtggagtgcgcctgtaatcccagctacttgggaggctgaggagggagaatcccttgaaactgggaggcagaggttgcagtgagcccgagatcatgcgactgcactccagcctgggcgacagagtgagactcagtctcacaaaatacaaacaaaatcttcaataacaaggaatgcagtattttgaaaaactgaaattaacaccaaaatgtgtatgatgaacaaaaattattattattattattatttttgagacggagtctcactctgttgtccaggctggagtgcagtggcgcgatcttggctcactgcaacctctgcctcccgggttcaagcgattctcctgcctcagcttcccgagtagctgggattacaggcacgtgccaccacgcctggctaagttttgtattttttgtacagacggggttccaccatgttggtcaggctggtcgcggactcctgaccttgtgacccgccctcctcggcctcccaaagtgctgggattacaggcgtaagccaccgcgccccgctcaaaaattaaaatttttactcggcagggcacactggcctgtagtcccaacactttgggaagctgaggcgagcagactgcttcagctctgttcaaatccagcctgaacaacatggagagaaccctgtctctgaaaaataaataaataaaaagatcttggaaggtgtctgaggctcaatcagggttccaggagtccccctgcagctcctacctgtcgttctcactcatacaaaacactaaggaaagttactagatttgcagctcactcctgccccctggtggtgatcggcttgggcacaacagcattccaggggtttttatccaatgcttttgcaaatgtttcctgaaggtcccctttctggcactgtgtatgttgcaagaaaaagtccgtgctctggtggcacccacagtacatgggaggtgacaatacacaggtctgtgtgaagaaaggcatgtgaggcaggtttggtggctgagcatgaggggaattaaagtaggtcaaggagggcctcagagaagtggcattgatctgtggtctgagtgacaagcagtcccctcagagatgatgtcccccaggagaggtaggcataagtctactggatcggaggtatttcatgtcttaaactgatgtgaacctgggtatttattgtactttgatcttagctcactgcagccttgacctcccgggctcaagcaatcctcctgccttagcctcccaagtatctgtaactacaggtgcgccccactgcgcccagcactgttttttttttttgttgttgttgttgtttttgagataagtctttgtcacccaggttggagcgcagtggcgtgatcctggctcactgcaacctccacctctcaggttcaagcagttctcctgcctcagcttcctgagtagctgggactacaggcacgtgccaccatacctggctaatttttgtgtttttagtgcagactgggtttcaccatgttagccaggctggtcttgaactcctgggctcaagtgatcctcctgcctcagtctcccaaagtgttgggattacaggtgtgagccacgcctggccgtgcactcttctttaagacttttcctgtggcagaaatattttgtgacttttgaagacggccagcaagtgccaaggtccccgttcagagaatctgagtgccaggtgccagttgtctgaaccattacctcacttgtccccctcactacggcctgaggagggcactagcgcgacgacgttagccctaagagcagggacactgaggctcagcgcatcacccaaagccacacgaagagaaatttcaagtgctcaagggccagcatggagttggggacaacagggcagcgaggcaacaggcagatggtgctgggggcctggtcagttgcagggaggacttcggcttctgctcccagggaggggagtcctgcgaggcttttgagcagaggtgggacatgccctgacctgggtgttcacaggtaccctctggctgctgcctgttcaggggctgacttgtagtggggaatgaggaggaggctggggcaggaattagagccagaggcgatggggacctgaaggccatagggacaaaaggcagtggtcagaatcaagaatgtttgggggggtggggccaagtgcagcggctcacacctgtaatcccagcactttgggaggccaaagtgggaggatcacctgaggtcaggagttcaagactagtgtggccaatatggtgaaaccccatgtctactaaaaacacaaaaaattagccgagtgtggtggcgggtgcctataatcccagcaggaggctgaggcaggagaatcacttgaacctgggaggtggaggttgtagtgatccgagattccaccaccgcactccagcctgggtgatagctggactctcaaaaaaaaaaaaaaaaaaaaatctgtttgggggcagcgctggccatagggtggggagatatagtccatccaggatgctgctccaaaaggttgtaggaagctggaaaggtgtggggtgcgggcaggtgcgccagatccacaaaaccctagggaatgtgacttggtttgcagatcactactgccctctggtggtgatcagcttgggccaccctgcattctggaggtccaagtagggacaagggagtgggtgggtgagactgaaggttgggggcttttgaggcctctggaagaagactgttccaagttgtggaacagcatgtgtgaggcgaggacccacgatggctggtgggcaaaggaccagagaagcacagctcagcccccaatatcccaccaagtttccctcccacctacaagagatgggctgcctgaacggccctcccagcagcccagagagcatctgaaatcttttattggaagatcattgctgtttgccaaatagaagacacagacagcagacgaacagtgaaaacagagcccagtgacgagagccggccccttggctggggaccctccccaactacctggtagaccagcctggtgacctctgcccttccccggacccccgggcctttggcataatgctgatggggggctgcaggcagtgaagccccttgactcaaagcagagacttgaatgggcgctggagagtggagacagtggagaggccagggagggctgggcgggccccccaggctgggccgagcagcgcaagtagaggaagtcaggagcgggcgagatggcatctatctgttttctgaaaaggggcacataggggcctggaagcaggtggcggtggtagctggggcaggtcacacactgacatccttctcatcgcccgtcttgggaacagcttccagtaatgggtccccaggacctgcctcctctccctccttggcctcgctggccttagagttggggacccagaggccagagtcaatgcagcgctgcatgtggtactttgcgtcctgtgaggagaaggcaggcagatgaggtggggccgccagccggtggtccccgttgtccccgttgtcccttgcacatccccaagctggcttcctgcctattgatattttacctatttgagacggagtctcactctgtcacccaggctggagtgcagtggtgcaatctcggttcactgcaacctccacctcccaggttcaagtgattctcctgcctcagcctcccaagtagctggggttaccgacgcctgtcaccatgcctggctaattttacttttagtagagatggggttttgccatgttggccaggctggtcttgaactcctgcccttaggtgatctgcctgccttggcctcccaaagcactgagattacaggcgtgagccaccgtacccagctggaaatttaaattttatttaactttaatttaaatttagatagtgcaatctagaacaaaagccagcaaatttttttttggtaaagggacagactaaatatttctggttccgtgagccatatggtctccatcacgactcaactctgctgtggtagagcaagatcggttgtagatgatagggaaacaattgagtgtggcttctttgttctaataaaactttattataaagacaggcagtgagtctgggagctgcggtttgcagaacctggtctagatggctatgcccatagaagcttctagaaactcagggccagtcctgcagctagacccattttacagacgagaaaaccagtgtgatcaaccagtgagccaagtggtaggaataggatcaaacagtgtcctacttagattcaacgtctattaccacttccaaaaatatagccagtgagaccttgtctttataaaaacataatttaaaaaaaaattagctagatgtcatggtgtcagcctgtaaccccagctacttggggaggctgaggtgggaggatcacttgagcctgggaggtcgagactgcagcctgggtgagagaggaagaccctgtctctcaaaaacaagtagacaaaatccaattaacagccagcgtttaccagcccctgccatgtgctcacctccctttcccacgcattttgtgagctgatattgagagaaaatgtggtttggataaggaaactgaggctggactcagtcacagtaacagtgacagtcacgaaggacatgcgctcaaagctcagcatttatctgctggatactgggatacagtaggtgctcaatatatgtgggtgtgtgccaaggtgacacgaccccccttactccttggagaagccttggaggggcactttcaccagccggcttcagagacttgggacacagggctgggggagacacacggcccgccgggaaggcatggggcgcgggggttactcacggtggggtccatcttgctgatggcgtcctgcagcatctgcacgtccttcacatcgaagcacttctggagttcctgggggtacagaggggctggggtcaggggctgggtccctgtggccctggggggtcccgctcagggtcttcctgctgcccgcctgggccggggagccccacctcagggagggactcgtagacctcgacggggtccaggccgccggggccgagccgcttcttgcgctcctcctcctcgtactccttcatggccttctcgatgcgcagcttggcacggccccgcacacgctccttgaaggcttccagctcgtcgttgaagccctccatgtactggcgatcggctgtctatgggggttgggcagtgctcactggacctggcccaacgctcaggagggactggggggcccaggaccctccagccacagctcctcagaggcgccccacggttccccaagtctattcctgacctacatgaagggctccccaaggcctgggctcccccgccggggacctcatctggcatttgccaaagaccacctgcttgggagccctgctctactgcagatctgagacactcatgtcctcagtgtccctgcatgggcacctctaactcaacatggccacctcccagcctgccttgtccttggtctccctaatctcggtaaggatagccctgttcctccaggtacgcaggttaaaaatcctagaggctaggccgggcgcggtggctcacgcctgtaatcccagcactttgggaggccgaggcgggcggatcacgaggtcaggagttcgaaaacatcctggctaacacggtgaaaccccgtctctactaaaatacaaaaaattaaccgggcatggtggcacatgcctgtagtcccagctactcaggaggttgaggctggaggatcgcttgaacccaggaggcggaggttgcagtgagccgagatcgtgctactgcactccagcctgggcaacagagtgagactccatctcaaaaaaaacaaaacaacaacaacaaaaaaaccctgaggctggcaggcacctgtaatcccagctacttgggaggctgaagcactagaattgcttgaacccgggaggcaggggttgcagtgagctgagatcacgccactgcattccagccttggtgacagagcaagactctgtctcaaaaatgaactaaaacccaaaaccctagaggcaccctcacctttgtcctttacccacatattcacctgggtaccttcagcacatcctactgctcccacatttttttgtaatgcagttttgctctgtcacccaggctgcagtgcagtggcaaaccacagctcaaactcctgagctcaagtgatcctcctgcctcagcctcccaaatagttgggactatagtactcagtcaccaagcctggcctgacctccacttttatttaattaattaatttatttatttatttatttttgagatggaatttcgctcttgttgcctaggctgaagtgcaatggcacgatctcggctcacagcaacctctgcctcccaggttcaagcgattctcctgcctcagccccccgagtagctgggattacaggcacacaccaccatgcccggctaattttgtattttcagtagagatgaggtttctccatgttaggctggtctcaaacttccaacctcaggtgatctgcccacctcagcctcccaaagtgctgggattacaggcgtgagccactgcgcccggcctccacttttaaagtctggcagaatctgcccacttctctcctcctccctggccccaccctctcctgatctaggatgcggtgactggaggggcttgagtcccagtggagaggagtcggccttacctagagcattgtgggctggttccctggggagggggcctccagccacctggcagctcagggaccctaccttaatcttagtgaagaactgccggaagcaggcccgggggtccacctttaggctcttggccagctccaggataaattgcatgacgattgtctggtgggccacctgctccatgagtgcacatttctgccaggaagaacaggcacagcgtcaccaagtggcggcctcatggcagcgccttttcacagtcccggggaaagctccactcacctcctccacctctaggtcaatgcaccaaatgaccaggtaattggctgtctcctcgcacaccaggtggacgttgtctgacaggtacttttggctgtcatcccagcggcgaagcatgcctgtgggaagatgctggcaaggtgctggagggccctggaggcaaagggcctgcctcgaccttgccccccataacccacaagccccactcaccaaagtgcttgatctgtttctcgtatttttccacgaaggtcttgtgtttctgctccctcacctcctctgagtcctcctccgtcttctcgggcttggtatttaccatgctctgtggtagggtgagagggggagtgggctggggcaaggctgcggagcgcctcgagcgcggccgggcgggccgtggtcgcagcgcccatcccatccacggcggaggtggtgacgaagccatgagcatcaaggtggcgggagcgtgggcatgggccttggggcagatcagaggaggggaccggtggggtgtttcatccgcccggccccccaagcctgtcccccctcccacgtggcccccgtccatccctcagctccccgccccccaccacactcttcaactacaccaccggggtcctcccctgaccaggcattgggtgcgcatgcgtcctggttgcaggctctctggctgcgcatgcgcactgcccgccccgcccgccccgcacaccttgctgaagccgtctttgctgagcgtgtccacgttccagggcatgctcttctccttcttgcgcatctcctccagcttctgctcccagctccgctcctccttgcgcagctgctgtgcctcggcctgcaggcgctccagctctgccttgccgccctcggccacctccagctccttcagtttcctctggcactcggccaccttgcgcttgcactcgcggcagcccctgtccagttcctccttctccttctggaactgctccatgcgttccacccgggcctgcgggcagggacggcctatcaactctggggagtcgtctgtcccttacccccgccccatacccaatccctgcaccggagatggccccaggaaaaagtacgcgtccacctcccgtgccctggtctcccagcttccgcccctgcgcccacaggtgccagcgcacacccaagtggggtcaggtccctccgtcctctgctcagaaccctggcggctcccatctcacagcagaacccaagttgtcaccacagcctacatgggccctacacaatctgcctcggcacctcccctggtaactcttccttccagctacaccagcccctcacttttctcaccttttcttgaggccattttttttgtttaagaaaacaaaacaaaacaaaacaaaaaacagggtctcactctgtcgtccaggtcagagtgcagtggcccaatgatgacatactgcagcctcgacctccctgggctcaggcgatcctcccacctcagtctcccaagtagctgggactacaggtgtgcaccagcacgcccagctaatttttgtattttcagtaaagatggggtttgccatgttgcccaggctggtcttgaagtcctgggttcaagcgatccttccctctcggcctcccaaagtgctgggactacaggcgggagctactgcactctgcggagcccacttttttcttgaacctcaaggccttcgcactggctgttccaactacttggaatgcttttccttcagagccccccacagctgactccatggcacccgtgccatctgggctccatgttgccttagcgaggaccccttccccaaccaccttcctgatgatggcaacttcccgctgcccctgtctggaattccctgcctcctcaacatcagcaaccactaacatcatatgacaattatttatcacgttttgggtactgcccccctccaatgaatgaagccctgctctctaaatatgggaacgtgttcgccattttgttcccagaaccaggaacgtggcctggtgcaaagcacgggctcagcaaatgcttgtttttttttttgtttttattttgttcagttttgtttgaacaaggtcttgttgtcatgcagactagagtgcagtggtgtgataatggctcactgcagccttgatctcccaggctcaacctgcctcaaccccaagtagctgggactacaggtgcacacaaaccaccaagcctggctttttttttttttttttttttttgagacggagtcgcccaggctggagtgcagtggcgtgatcttggctcactgcaacctctgcctcccgtgttcaagcaattttcctgcctcagcctccttagtagctgggattacaggcacgcgccaccacgcctgggtaattttgtatttttaatagagacggggtttctccatgttggctggtcttgaactcctgacctcaagtgatccacccaccttggcctcccaaagtgctgggattacaggcatgagccactgcaccagggccccttctagatgtttctttgttccacccataaccttgccccaggatcactgccaaggccctcttagctctgtctccagcccagcatgccctcctgagccccagcttggtgtctacctgcttcccgctcaccccagccccagatgtcactccccaggcactcctctttctccttataacagtgcctcatctcctcaggctcctggtccccgcctcactccctgtctccctcagacctccatctgggccccatcggattgtacaggcctctcctgagacccctgcgtggctccaccatcacctctcctgaacctcagtggaggctgctctatccagagccactaatcaaaccctgaaaccctgaaacgtgccaccaccttcaattgctgaccctctccaatccaggcacagctgccaccagggaggcctgtgaagcccatgcatttgaccacgtgaccagagtcctccccactacatcttggggggtctgaattcagatgggacttctgatcctggcatcctggtcctgggtcccaggcagatactggccctcatcgttccccgaaagtacgggctctgtcttgcctcttggcctctgcatgtgcggttcccttacctgcttttgcacccaaaactcagcttcaacagagccttccccaaatgctccctgcctgaggcaccactgatccctaaaggacctcctgtgaccatctgacgatgtggtgagggtgctggaggacagccttggggcaacggcccctgggtcctagcccacagccaccatgtaccggctgggtatcccgggccatcccctaacctcctgtaacctcagtttcctcatctgtcaaacagtcaacaatgctgactgcacaagctcatattggaagaaactaaggagatgattagagtaaaatgtcccgagccatgtgggccctcagcacgcacccttcctgtactggccagggtcattaccatctgtgcaagagaacaatctctctctctctctggggaccactctggggcctcaaaaaggaaatgtccttcaaatgcttagtttaatttctggcccagagtacacgctcaataactgggagtggttgttactacatggtcacagcacccggctgtgccactgacgggagatggaactttggccatgtcactgaaacctttcccagccttggtcttcccctctgtgaaatggagtctcacaggatcgccgtgagaactgaatgactaactctatggaaaatgcttccaaaacagccctcagtaggtgtgtcccactgttaccatctccgtccttgtcactgccacctgaatggtctgctgactcattcctgtgccttatctgaggctgtgtccccaggttctaaggcagggccaggcagagctggcccctactctaataccccaggggactgacacagccagcctgagcctcggattcccctatatgtataaggggtcaagaaggcctacgtggtcgagcgtggtggctcactcctgtaatcccaacactttgggaggccgaagcgggtggatcacctgaggtcaggagtttgaaaccagcctggccaacatggtgaaaccccgtctctcctaagaacacaaaaattagccaggcgtggtggcaggcgcctgcaatcccagctactccagaggctgaggcagaatcgcttgaacccgaggcagaagttgtagtgagctgagatcgccccactgcactccagcctgggcgacagagcatgaccctgtctgaaaaaaaaaaaaaaaaaaaaaaaaagctatacctcatgagataaacagcagctgcaggctgggcacagtgacccatgcctataatcctagcactttgggaggccgaggtgggaggatcacttgagctcaggaatttgagaccagcctaggcaacatagtgagattccatctcttaaaaaaaaaaagttgctgggtgtggtggctcatgcctgtaatcccaacactttgggaggccaggcgggcagatcatgaggtcaggagttcgggaccagcctggccaacatggtgaaaccccatctctacttaaaaaatacaaaaattagccgggcatggtggcgcgcacctgtagtcccagctactcgggaggctgaggcaggagaattgcttgaacctgggaggtggaggttacagtgagccgagatggcaccactgcactcctgtctgggcaacagagtgagactccgtcttaaaaaaaaaaaaaaaaaaaaaaaaagcagctgtggcctctccaactccctttctccacgatgggcctgtgtcaccctggagcctgcccaccaccctgcaatccgctgctgggctgccaccagtctcccctgtgtcctctgaacaactgccagggaggccgcagctaaaaaaggcctcttggagttggcgggggcggcagcctgcccagcctgggctttacacctcctatcggggaggggctgtagcaggctgggcaggggagaagccaccccagcaagcagggcccacagatgtcactaccctcctgccttacagttagggaaactgaggctcacagaatctcaatgtcatacaactcattagaagaaaccactaacagcagctgtctctgggcaggagagccggcgagctggggctgagaaaagggattcatttgtccgcttctggaaactttgaaatttttttttttaagagacaaggtcttaggccaggcttggtggctcacacctacaatcccagcactttgtgaggctgaggcaggtggattgcctgagctcagcagtttgagaccagcctgggcaacatggtgaaaccctgtctctaccaaaaagtacaaaaatcaaccaggcatggtggtgtgtacctgtggtcccagctactcaggaggcagaagtaggaggatcacttgagcccggaaggtggaagttgcagtgagctgagatggcgccactgccatctcagggtgacaaagcaaggccctgtctcgaaaaaaaaaagagagagacaaggtcttgctatgttgctcaggctggacttgaacttctgggctcaaatgatccttctgcctcagtctcctgagtagctaggactataggcatgtgccaccacatgtggctacagatttttttttttttaaccatgaacagaaattatttaaatgatgatgatgataatagccactgccccaaaaggattacaaatattaaatgaataaggtaagccttacaacaaccttatggggtggacatcattcagattctcaggtagggaaactgaggcacagagcgatcaaacagctccctggcagtcacgcagcacgtgagtgatacagacagagctgagatttgaacctagtcaggcctgtgctctgaacgacagcaatctctccttcccctccacaatgcttccttccaaacctgccccaagttttcctgacccagtcttaattcattcttacaaaggtctcagggaggtggggccatattatcccaggtttcacatgggctcagggaggcttcttgtgagtcttgccacatcaaagaaagaaagaagcagcaagaggtggggctaggattggaacccaagcttgcctgtccttgaacctgtgctggagacgctgaagccccctgcctcccttacatgccactacaaccaccggggttctcagcggcaggacaggaaaagctctgtgccagagggaggagggtgtggcaggtacactacgctgcaggaggggggccctcccacccggcaggaccaaaccattctccacagtagtaaagattaacctctttatgtgacagaaataggtcttcccaagaatagtctttggagctttgaggaagtcttaaatatttcataataaaatgttacacacggcaagaaatagaagcgctagaactttcttcccacactccagtggcttgcttggcaggtacactacccaggagactcaggatttaaggaataggtctggaagtgggactgggagctagatgaagagactaatgccgtattccagagtattctggaaggatgggaaagggaccttctagttgtttctggataaatgatggggaattgccctatgggagggtggggtaagagatcctcactagaaggttctgagaggtatatgcccttcgtttaagagcacaacatggctgggtgcggtggctcacgcctgtaatcccagcactttgggaggccgaggtgggtggatcaactgaggtcggaagttcaagaccagcctgaccaacatggagaaaccctgtctctaccaaaaatacaaaattagccaggcatggtggtgcatcatgcctgtaatcccagctactcaggaggctgaggcaggagaatcacttgaacccgggaggcagaggttgcagtgagccaagattgtgccactgcactccagcctgggcgacaagaaggaaacttcgtctcaaaaaaaaaaaaaaaaaaaaaaaaaggaatacaacagacactggtatgtaatgcaggcacactcatttggggtagcaggaggttaaacctttaagtcttagtcatcccattggctcgtgagcactgagagggtggtgggacatggatcacccaggcttgggattctggggtctggattcgggacctctgttgtggtcagatagaagaaggggtggtgaatttagaatcagaccaggagagtccctggataagagcagggacaatttgggtcacagagtagctaacaggctggggacaaaaggtggggtgggtttggggttctgggcttgagttaggggagagtttccaatgctggctgaggctcatacaggaagccagtctgggaagtgggtggtgacagggtctgcaataccaagtaggagcaggggctctggctaggccggaagccacgtgggcaggatttcctggtataatgggaaatgggtctaccggaggccaaaggagaggctggaatgtgaggctctatcgggttggagctggtagttagatccagaggggaaccagattccaaaacccaagtactcggtgagactaaggatcctgaagggggacggttctacactctaggaagggggtcctgggtgtgggcagggacaggaatatcagagtagcacagagttccttgttccgtttagaaaaggagtggcgactccggatctgaatgggaaccccggatcaagatcccggaaagtagatcccgggacagaccaaagtattgggggtccagactacggaggtgggggggcgatgggagatcccagataggaagtgaatacccgaataggatgagggatcatctagaagaatttggggtccaaactttgaggcagagttctgggtataaatgttaactgccgaacagaattagggagaacccccaagactcgtctaggggactccagactatgaagaagttctagggggtgaatagggaatcccacgcaaaaatcggagcagggagtgggggagcggagatccagggcagggactcagggtcccaatggtactggggtcccggagttgaatcgaagctcctgaaaatccagactgggggggtgagaatcctaggtgtgaacagcggggtccctgggcagtatcggggatcacaactccgaagcggggtccgggagtggggaaagggatgggcgcgcgcgccttacctgatgccgccagcggaagagactggccgtgtcgatgttggggtgcgtctcgtcttcatcatcagacacctcaatgtggtcccacacgctgtagtccaccatcttgccttggcggcccagcccgctccggctcgggtggcggcgacggcggcagcagtggagactaggagcgcggagccccgccccttccgcttccgccgagcgcgggaaaccccgccctgtgtgacgtcacatccctagtaaccgcggcagcggcactagctacccagccagccttaaagggccctgcgtaagtgttccggccccctggagttcccgcagagactccgcgtcatcgggcgctggggctccgctaggtctcctgggggcatatgagtgcgcgcttcaactccgagcccccctcatctcccgccgctccacggtgggcgtttggggtggcagggaggggacggttgatgagactgagaggactgtcccctcagccacgccgcagtgacgtctgcaaggggtagggacacggcgggaaggccctccccctgcccttcgtaaacggggacctaagcctgcgctggagaggggcgcctgatgactcctcggactttctcagcccgaggaggactggacctgccctgggggtgtctaaatcgggggtggtatggccctccccttgcagggttaaacgtggaggggagactgtggccctgccttgggagctggggtttccccgcctcggcaacagccttctccttgtcttccacctcctgccattcgcagcgaggactcgcgcgagcgcgcgcgcgcacacacacacacacacacacacacacgcacacacacacacacacacactttggaatcacccggaccccctcaaaacgggtctcggctccccaccccgctggccgctgggtgtcgctagagtctagcccacggcgcgtattcctggccccgcgcttggtggggggaatcgtggaggggtggaagggggctttccttgtcgtcacagtctggggccacgcatagcccctccccgttcgtcttggggtacgcttcctccgccggggctctaaggactccattactctaagcatgcagggcctcgaccacctcacacttccatgcatcccaatccacgctttgataccaggataataggccgtgttgcagccttgggccaggattatctcagattaaagggtgctccctcgggggtcaggctggataggaggagctccagccactccggtgaggggcgcctcttcctagtctcccctggagccgacgttggaggcagtgcctggagagagcgagcgaagttctccagaagggggaggattccccggtgcatggagcgggaagggccatcggacaaaaacgtcctcccgctgccgcccttccccctcgcgcttcattcaaacccgcgagtgggcgggcaggggcgggggagtccccatctcctacccctccctcttcccctccaccctggcagtccagcacatcagtggccgtcacggcccgggcacgcgcgcgcacggacccacaccccggcggctctcacaatcgcacacacacatacacacacacaccagcaaacaaagggtctggacacccccgtcccctcccgccccccaggccagggagggcggggcatcccctccccaggccccccgcaaggtaagcttggggctgcgagctgcggtggggagggggacacggtgccacagtgggagggggccaggaaggtagggggttccccggctccccaggaaagtcgtacccccacccccaccgtatgccctttagggattcggccccgtcatcagcctgggggtgtttggagagaatcccagatgtcggggattcccggataggcgcgggggtctcttcctggctctggagactggagctgcccagcttcagcaaaacagggttcccggagcctcagcttccagaactggggatagagcgccggaagcttccccatcaaccccaagcatttcctaatctgccagcacagcacctccagccctggggactgaggagagagacccctaagttgctttgcactgtccctctgtccccggtccccatcccacccccatcggtgcaaaccctgctatgtctctcctgcctgtgtgtgtgtgtgggggggaggtttgcgggaattgggaacgctttttggggctacctttgcttcttctgctacatcccatagccacataccactgagctgcggtggggcccggcaggcggctttgccttcctgagtctcaatttcctcctctgcaaagtgggtaatgacacacacctaggattccgcgaaatcgtgctcgcggagcctgcttttgcgccatcattttatttattagctcatttcacatctctttcccaagtgtctacttacgatgtactgggcactgtgaccaggctttggggcagcagcaaccaacaaacccagtaggggtccctgctcctggctagtgagggagcaggatccctgtataaacatacaaatccccgcgggtgatttcagactgtgaagactaaaattctgtcctcggacagagagagactagggaaaggcactcaagattaaaggagaagctgggcacagtggctcacgcctgtaatcctagcactttgggaggccgaggcaggcggatcacttgaggtcaggagttcgagaccagcctggccaacatggtgaaaccccatgtctactaaaaatacaaaaattagtcgggcgtggtggcaggcgcctgtaatcccagctacccgggaggctgaggcagaagaattgcttaaacccgggaggcggtggttgcagtgagccaagatcacaccactgcactccagtttgggtgacagagcaagactctgtcagaaaaaaaaacaaaaaacaaaaaacagattaagtaagacttctggatcctgcctgccttcctccttgggtctgagctcatgagggcaggatcaggtctagaacagtgcctggcacacagtaggtgctcaataaatgttgaatgagcgtggcaccctggtgtgagcctgtagtcccagctactcgggaggctggctggaggatcccagcgacacccatctctaaaaaaaaataaaaacaaaaaataaatccttagctgggcatggtggcacacgcctgtagtcccagctattcaggatgctgaggcaggagaatggcttgaacccgggaggcagaggttgcagtgagctgagatagtgccattgcactccagcctgggtgacaagagcaaaactcaaaaaaaagaaaatcttaaatgaattaaagaggggattagtttaagactagattctagaactgtagattaggaagaaggcttagcataaaccaatccaccccactcccttgaatttgatacaggagacagtgaatcccagaatgtcaacatttctacaaaattgaagatgggcccagcacgatggctcacatctgtaatcccgataattgggaggctgaggtgggaggatcacttgagcccaggaggtcgaggctgtagtgagccatgatcacgtcactgcacttcagcctgggagacagagtgagactctgcctcaccaaaaaaaaaaaaaaaaaaaaaaaagaaggtggttaaagcaagggttgtgaacagctgtggacagagaccagaactgagcactgtgtgcccaggaactcatggtgtccagccagtgcccactcttccccacatagcatatagacacagcactgctttcatctattcaatatttattcagcacctactatgtaccaggtgccagggacacagcaattaacagaacaaaactccctgccccagtggagctgacatttagtggaggaaactgaaatgaaataacatgatcaaaaagatataatgacacattgttattaggatactgatagaaatagagggtgtggctgggtgtttagaaagacttcctgcagaagctgaattcagcacacacacactcaaacccaaacataatcccactaatacacatcacagaaaagtggccatggggactgagtggctgagcagagatttaaacctggaacctgcatttcttttttctttctcctttttttaactaattaatttatttattatactttaagttctgggatacatgtacagaacgtgcaggtttgttacacaggtatacacgtgccatggtggtttgctgcacccatcaacctgtcatctacattaggtatttctcctaatgttatacctcccctagccccccaccccccaacaggccccagtgtgtgatgttcccctcctggtgtccatgtattctcattgttcagctcccacctatgagtgagaacatgcggtgtttggttttctgttcttgtgttagtttgctgagaatgatggtttccagcttcatctatgtccctgcaaaggacatgaactctttttccttccttccttccttccttccttccttccttccttccttcctttctttctttctttctttaattgagacagagtctcactctgtcacgcccaggctagaatgcagtggctcgatcttggctaactgcaacctctgcctcccggattcaagtgattctcctgcctcagtctcccgagtagctgggattacaggcacgcgccaccacacccagcgaattttttgtattcttagtagagatggggtttcaccatattggctaggctggttgaaaactcccaacctcaggtgatccgaccgtcttggcctcccaaagtgctcccaatgagccactgcgcccagccctcctttctttttaaagacaggatcttactctgtcacccaggctggagtgcagtggcaatcgcagctcacttgcagcctcaaactcctgggctcaagcaaccctcctgcctcagcctcctgagtagctgggattacaggtgcacagcaccacacatggctaattttttttttcatttcattttaaagacggggtctccaagagttggaggctgcagtgagctatgatcgcaccgctgcataccaacccaggcaacagcaggagacctgcctcaaaaaagaaaagaaaagagatggggtgtcgctatgttgccctcactggtctcaaactgctggcctcaagcgattcccctgccttggcctcccaaagtgctgggaatataggcgtgagctactgcgcccagcccccggaacctgcatttctaggcactgtgaaatactgttttccgctgcatcttcacacagtgacacccccacacacctacacattcatattacagtcacacaggcacagccaacctcttattcacatagaccgatgtggtattgccctgacacatagattcctgcgggtacaattcggtttcaactatgcaacacttagactcacagaaggttccaccagcccattggcacatgcacagccaggtatgaagttcatgcacatatatgcatgtatttgcacacacatgcctggagtccttcacaatccttccgagacctgcgtcagctttgagcatggagcttgggcagccgtgaatattcagggccatggtgtgggcaggggcttttattctcacttccctgttatttgctgcacatcgccacatccttctgttgaaggaagtggggagtgggcgggatgtcgggctgggtgacatcagctctcctctgccaggccaggccagtggctcccaggctgggctggtagctgacggtgctgacaacatgggtgggggaaaaggactctcgtggcctgagcctgatgccagctgtccagagcagcctgtgctgccatctggacccccatctccagcggcctgctgtccagggaaggagaaggcaggcctagaggcatccctccaccctgagcactcccgggccctgcctccctcgcctgggctgcagccagggctgattgccgcaaatgtgcacttgtgtcctgacagcagtaaggggcatgtctctgcctctctcgcctggccggctggacccctccaacatcgtcttcttcattgctttcttcatttcacaaatccttgagactttgagcaacagaatttgcagagcctagggaaaatgcacacgcagggttcctcttcaagattacaaacaataggccgggcgcagtggctcacgcctgtaatcccaacactttgagaagctaaggcaggggaattgcttgaggccaggagtttgagaccagcctggccaacatggcgaaaccccgtctctactgaaaatgcaaaaattaactgcgcgtggtggcaggcgcctgtaatcccagctactcaggaggctgaggcaggagaatcatttgaaccctggaggcggaggttgcagtgagtcgagatcacaccattgcactccagcctggatgacaagagctaaactctgtctcaaaaaaagaaaaaaattataagtctaaggcaaagaaaacacaagcagggctgggagcggtgactcacgcctgtaatcccagcactttgggaggccgaggtgggtggatcacgaggtcaggaaatcgagaccatcctggctaacatgctgaaaccccgtctctactaaaaaaaaaaccaaaaaattagctgggagtggtggcaggcgcctgtagtcccagctactcgggaggctgaggcaggagaatggtatgaacccgggaggttgaggcagcagaatggcgtgaacctgggaggcggaggttgcagtgagctgagatcgcgccactgcactccagcctgggcaacaaagcgagactccgtctcaaggaaaaaaaaaaagaaagaaaaagaaaaagaaaacacaagcagagtcagggggatgggaaaagcaacaggatatctgaggtctgaatatgttctaggtgtttgaagaacaacaaaggggctggtgggttggccagacatggtggctcacgcctgtaatcccagcactttgggaggctgaggcaggaggatcacctgagccaaggaattccagacctgcctgggcaacatggcaagacaccctctctacaaaaaatttaaaaattaactgggcgttgtggtgctcacctgtagtcccagctacttgagaagccgaggcgagaggatcacttgagcccaggcgtttaaggctacagtgaggtgtgataacatcactgcactccagcctgggcaacagagtaagacccttgtctcttaacaaaatgaaaataggccgagcacggtggcttactcctgtaatcccagcactttgggaggctgaggcgggcagatcatgaggtcaagagattgagactatcctggccaacatggtgaaaccccgtctctactaaaagtacaaaaattagctgggtgtggtggtgtgcacctgtagtcccagctacttgggaggctgaggcaggagaatcacttgaactcaggaggcagaggttgcagtgagctgagattgtgccactgcactctagcctggcaacagaacgagactgtctcaatttaaaaaaaaaaaggggaacagaaataaattcacgtgcattacttcacttcatcctcacaacaaccccatcagatgggtgtgaatattattcctattttacagatgacaaaactgagggccagagaggctgagtaatttgctctaaagtatacagacagagctgagagatactgtgagttgagttctagactaccacaataaagcgagtatcacaataaagtgatacaaaaaatttttggtttcctagtgcatgtaaaaattatgctgacactataccatatgtatattaagtatgcaatagcattatgtctaaaacaacaatgcatataccttaattttaaaatactttattagcctggtcaacatagtgagacctcatttctacgaaaaaaatttaaaaattagctgggcatgttggtgctcacctgtggtcccagctacttgggaggctgaggtgagaggatagcttgagcccaggaggacaaggctgcagtgtgctatgatcacagcactgcactccagcctgtgcaacggagtgagaccctgtctcaaaaacaaaacagaaaaaccttaaaaactttattgctgcccgggtgtggtggctcatgcttataatcccagcactttggctgaggcgggcagatcacttgagcccaagggtttgacaccagcctggccaacatggtgaaaccccatctctaccaaaaaatacaaaaattagctgggcatggtggtgcacgcctgtagtcccagctactccagaggccgaggcaggagaatcgcttaaaccccggaggcggagattgcagtgagccaagatcacgccactgtactccagcctgagcgatagagtgagaccctgtttgaaaaaaaaccaaaaacaaaaacaaaaaaacctttcttgctaagaaaagctaaccatcatctgagccttcggcaagtcataatctttttcctggtggagggtcctgcctcaatgttgatggcttctgactgatgagggtggtggttgctgaaggttggggtggttgtggcaatttttaaaaataggagaacaggtcgggcggtggtggctcatgcctgtaatcccaacactttgggaggccgaggcaggtggatcacttgaggtcaggagttcaagaccagcctggccaacatggtacaaccccgtctctactaaatatacaaaaattagcctagcgtggtggtgggcacctgtaatcccagctacttgagaggctgaagcaggagaatctcttgaacccaggaggcagaggttgcagtgagctgagatggcaccattgcactctagcctgagtgacagagcaagactcagtctcaaaataaataaataaataagataataataataatacttgaaagtcaaatgtactccttgatcagtgggctgcagaatggacgctgtgttagcaggcatgaaaacatctccttgtacatctccatcagagctcttgggtgaccagttgcattgacaatgagcagtcatattttgaaatgaaacttttttctgcacaggaagtctcaactgttggcttaaaatattcagtaaacagatgtgctgtcacccaggctttgttgttctatttatagctcagaggccaagtacacttaacatcattctaaaggtccccaggattttcagaatagtaaatgagaattggtttcaaccgaaagccaccagctgcattagcccttaacaagagtcaggctgtcctttgaagccagtcattgacttcacttctctctagggtgaaagtcctagttggcatctacttccaatagaagactattttgttgggcaggcgccgtggttcacgcctataatcctaggaattagaaaccagacggggcaacatggtgaaaccccgtctctataaaaatacaaaaaattaggtaggcgtggtggcacgcacctgtaatcccagctactccggaggctgaggcatgagaatcgcttgacctgggaggcggaggttgcagtaagctgcaatcttgccattgcactccagtctgagcaacaggctcttcccatccccctgactctgactcagaaaaaaaaaaaaaaaaaatagaccaggagctgtggctcacgcttgtaatcccagcacttcggggggctgaggtgggcggatcatgaggtcaggagatcgagaccatcctggctaacacagtgaaaccctatctttactaaaaatacaaaaaaaaaaaaaaattagccgggcatggtggcaggtgcctgtagtcccagctacttgggaggctgaggcaggagaatggcgtgaacccaggaggtggagcttgcagtgagccaagatcgcgccactgcactccagcctgggcaacagagcgacactccatctcaaaaaaaaaaaaaaagactattttgtctacactgaacaatttgttgttgattgtagccaccttcatcaataattttagctagatttcttctgggtaacttgctgcagcttctttctctctctttttttttttattaaaacatgtttactttttaggccaggcatggtggcccatgcttgtaatcccagcactttgggaggtcgaggtgggaggtttgcttgagcccaggagttccagaccagcctaggcaacatggtgaaactctatcactacaaaaaatacaaaaattaaggccaggcatggtggctcacgcctgtaattctagcactttgggaggccaaggcaggtggatcatgaggtcaggaatttgagatcagcctgaccaacatagtgaaaccccgtctctattaaaaatacaaaaaattagccaggcgtggtggcaggtgcctgtaatcccagctactcaggaggctgaggcaggagaatcacttgaacccgggaggcagaggttgcagtgagccgagattgtgccattgcacttcagctcgggcgacagtgcaagattctgtctcaaaaaaacaaacaaaacaacaaacaaacaaaaacccaaaaaacaaaaattagctgggcatggtggtgtgtgcctgtaatcccagctactcaggaggctgagatgggaggactgctttagcccaggaggtcgaggctgagggccacaatgaatgggtaccatttcttgctctgtttgctggagaatacaggttacaatcagagtggtgagtgctttaatgggggtagaaaaacctgcagtgggggcccagaacatggactggggcagtctggctgaaaaatggaggtgacctttaagctatctttttttttttttgagatggagtctcgctctgtcacccaggtcacccaggctgcagtgcagtagcatgatctcagctcactgcaagctctgcctcccgggttcacgccattctcctgcctcagcctcccgagcagctgggactacaggcgcccgcccccgggcccggctaattttttgtatttttactagaggtggggtttcaccgtgttagccaggatggtctcgatctcctgacctcgtgatccgcctgtctcggcctcccaaagtgctgggattacaggcgtgagccaccgtgcctggcctaagctatctttatacattcatccatttgttcaacaaatgtctgttgagggcccaccaggtgctaaaggctaggttgaagaaatgatgtttacattagtttccattaatttacattgaactgaagtgctagctaaggcaataaggcaagaaaaagaaataagaaccagactgagcatagtggttcatgcccagcatgaacatgggttcatgtaatcccagcactttgggaggctgaggtgtgaggagcactttagtccaggagtttgagaccagcctgggcaacatggcaagaccccatctctacaaaacaacaaaaacaaaaattagccaggcatgatggcgcgtgcctgtagtaccagctgctactctggaggctgaggtgggaggatagcctgagcctgggaggtcgaggctgcagtgagctgtgcaatggtgccactgcactccagcctgggcaacagagtgagaccctgtctcaaataaataaataaataaataaatattaaaaaaaataaagaaatgagaactaggctgggtgtgatggctcacacctgtaattccagcactttgagtttgagctttagtttgagctcaggagtttgagaccagcctgggtaacatagtgagaccccagtctctatttaaaaagtagaaacaaaagaaccaaagtaggggataaaccagctagtacacagtagaactgttaggaacattacactatcaggctctcaataataacctgacattgaacaggttattaaaagcctattatgttccggattctgttcaggacgctcaggagatagtaaagaataatactacattattgttaacataataattaaacaaagttttcgtgccctcctgcagctaatattccagtgtgaggagacacagacaataaatgtaataaacaaattacatagtgtggtatgaggggggaagagcgggaaaagggggaccagaagtcctaggaggttgtattataattttaagtgggggtggggtaagaaagaaagaaatgcctgaaaggatgagatataagcaaagacctaaaagaggtaagggacctgcggattttttttttttttttttttgagatggagtctcgatctgttgcccaggctggagtgcagtggcccgatctcggctcactgcaacctccacctcccaggctcaagccagtctcctgcctcaccctcccaagtaggtggaactacaggcgcctgccaccacgcacggctgatttttgtatttttagtagaaatggggtttcaccatgttggccaggctggtctcgaactcctgacctcaagtgatccacctgctttggccttccatagtgctgggattacaggcctgagccaccgcatctggccaacctgcggatatttgggggaagagttccaggtggacagaactgaaagtgcaaagggcctgaggcaccagcatgcttgctgtgtccagaaacagctagaccagtgtggctggagctgagggcaggaaggtgactgggcgttatctagcaggactgtgtgggccacgcgaggactttgacgtttcctctgagtgaggtaagagctattagggctctgagtagaggaagatcatgatctgaatcgagttctaacaggctcccacagggtcagatgttaccatttattaaatatttactgagtgccagacactattctgttcaatatggtttgatctcatttcattctcacatggaccctgtagggaatatcattccatttcacagaaaagaaactgaggctcacagagtttaagacactgacccatggccgcacagcaataatcttcagcgcctgggtgccaaggtaaagtaagccagcctctccctcccccaagcatttcagacaaggatcggtggctgcagagcgcacccgtcttcgggaacggcgtctgtgtccctgtctgtctgtttctatttccacacgtccctgtctgtctccacgcgcctctgcctgtgcgtcccccatctgtgcccaagccgccgtctctctgcgcccggcccccgcacatcggagctatttcgggtttaaggcttaaaagcccaacagctcggaggagacgcttcctccggcccccggctcggaccacgcgccgcacgcggccagctctgggagctcccagttttttctgcgggatccccgagccggggaagcccccgcgggaggaagggtgggggctggggcgacccgggcccggaggctctcggccccccagtggccaaccccggcattgacgccgtcaggagcccagccgtgcgtcagctgtcgccctggcaacgggggcgacgtcaccacattggtggtgcgtcagtccgctgacgtcacgccccaggagaggcaataggcaagtggcgggggcgggttctaggcccgaccggcagggggagccctggggcactgatggcagatgcgtttggcttggtcttgtaggaggccctggccctgccgacatggccaccgcagtcccaacggcgcgctaggttggcgagatgaagaggagtcgcagtgccctgtccgtggcagggaccggggacgaggtgcgagaggaggggcttgggctaggggcggggcttcgccccttgggggagactagcgccctctagtgaccacggctatttcctgaacgtggcttcactacctccaagctgtgaggagtttggtcccctcgtgcctcagtttacccccttgattccattttttctcctgctgccctaagaggctctcagccggcccagggacagcaggcaaaggcttctcaaatgaggagaggattttggcgaggaggtgggagggggcgctaggggtggtgaggtcttgagagtctcagatgtgagggatgggaggggggcattgacattaagaccaagaggggccctcttagacgtggaggttgggaagagaccctaaaaaggtgatgtgttagagaggtctcacacttgagacagaatgtctagatgtgacagaccccaaggctggggcatcgagaggggaccccacaaaaattatggctgagaaggggcactctcagacctaagggatggcagggcaccctctgtgtgaggggtcagcgagtggctcacacgtgaaggggagcctataccgccattaactactcccttagacagctaggtaggggtgttcttggggagaggggctcagagcttcccagccaggccacgcccctattccactttgtccctccccagaggtcgagggagacccccgaatccgaccgtgccaacatgctgggggccgacctgcgtcgccctcgccgccgcctctcgtccggtcctggcctgggctgggcccagcctgagccctcggaccctggggtccctctgccgccacggcccaccaccctgccgctgctgatcccaccgcggatttccatcaccagggccgagaacgacaggtaggtaggagagggagcagagtgggaggtgggttggggaggcacagtgccaactgggctaggtccagccaccagcccttcccgatctccatgctccctgccgtttgcaaaactagctgcaacttgtcctgtggcgggctgtgacacccctaccccaaggcacccttcgcaggctctaggaaccccttatttcattttccagctgcctgagtcagcaaggggcaggactgaggaaaggggtgtcatgtctccagcccccaagatgctcccatattcacagagctggggcaggttgatcaggcggctgtgcaccggctttcatgtccccgcctgggaggatcaggtttcttctccgccttgaaggggatggtggagtcttggaaggggtctggactagtatttttctttctcctggggagatgtgagaaatatctgcgagctctgggttcacacagcacctcctgctgattctcatctggggaccttccaggtacccaaccagtttcccagagtactcaacccccctcttggctcaagaatgagctggaaagtcagacagctgagctggtcctggcttctggccggcccctgcccccatgccctcctctggtcaccgctttcggcagttccaatccacccccacccccatctactcaattggagggttccagggtctctgtttccgtcatggtccaatggttcatttccagatagggagagcaagtgactgtctctcgcccctggagctgcttaattatacctctccacgcccatcccactagcctcaggtccagatcagtttatcccccagctcaggccaccgctcctcgtttcctccttcttctgcaaccccagctgtgtcctgacacccccacccacctcacattacgcactcccacccgcttccagatctctaaccaacgttacagcataccccgccaagaatttggcccagcccaggactctcaaatatgatctggggagaactcacagcccctgcaaattccctagaagccgttttgagtgtgtaatggggggggtgttcctgagagaagtggggaacacagttttggcccttggaatacccggcggctgctgatgggggggccggtttttgctcggcgttcgcccacgccgggagccccctctggcggggagaaaagtggctgtgggggttgaagaccggcagtcttttttttttttttttttttttttcaaataaggagaagggcgcggggggagggcggtggcaaacggcatcgcgtgccctggggagcccgtgacagggggcgcacgggggcaggggtctggtccccgggtcccgcagcagagcagtttcgcgttcgagctcttatcggcgtggggggggggggcggtgggacacgcgggcgcgtgcactccccccgcccagcagccatccttgggggggttgagggggatgggggcgcactcggatcccgctcgctctctgcttgctcgctcggcgcggcgctgggggaggcgggagcgtgagtcacggcgactcccgatttaggtgccggaaggggggctctgctggcgggggccgcagggaggaggctcgcctgtttactcgcctgaaaagggcacgggggtgcgctccgcggctacctgggaccttcctcagtttacctctggcagaagcgctttagaagaggcagcgatgtatagagcggtgggccggcagctgcggtatccgccacagggtgtcttcctggagccacaagggaaccaatgggacacaccccagaaacaccccagaggccccaggccgaccacacacatacactcacgcacacgcacacactaacatacatagacgtcctccgacactacagtcagacgacagaggccgaatcgcgtgcacaactccgcaagcacacaccgaccacaaacgcatccaagcgcttgagaacacattcacagtccccaggccacctgaaaaaagaccacgtagggatgcacatcctccaaataggtagcacatgtgcgcacacatccttcacccacagacacacacagttatacacacagccaaatccagagaaacgggcagacaacagcagccaaccacgtgcgcacacacacttccagccgacactgaaaacacagacaaccctcggaagaggccacgtgcgcgcacatcccgccccgggcccgcaccatcactatcctccgacgcacagacaggagatcccacacactctgccgccgcccgctgcaggtaccgcgccggtggcactaggaccactcctcaaaaactgccccccgccaggggtagcggcgaggacacgccaacaccggactccgccctcgccatgatggaccgactgactgacactctggcaaccagtccggtgtctgcttccagatcggattaaccgtttaactccttcgtgcctgtgcgcgccgcggccaagcagggtgctttgaagacagacgagttccagcgccccctcccagcccggagcggggatctgcgtgggcgggaagggcccccctccttaggtagctgccccccgctggcccggacggaggaggaggggggcggcgctgacagccgcggcgggcggggggcggggaggggcgggacggggcggaggagccggggctggcgccgagcgggccgcggaacgcggagcgcggagcgcggagagcgccgccgggcactgagcagagctccaggcgccgaaaggaagctgcagagcccggcccgggggcgattggcccgcagcgcccccgggtctgtccccggggcgccatggccctaccgcggccgggcgcacccgcggggccctgggctcgctggcttgcgcgcagctgagcggggtgtaggttggaagggccagggccccctggggcgcaagtgggggccggcgccatggaacccccgaccgtcccctcggaaaggagcctgtctctgtcactgcccgggccccgggagggccaggccaccctgaagcctcccccgcagcacctgtggcggcagcctcggacccccatccgtatccagcagcgcggctactccgacagcgcggagcgcgccgagcgggagcggcagccgcaccggcccatagagcgcgccgatgccatggacaccagcgaccggcccggcctgcgcacgacccgcatgtcctggccctcgtccttccatggcactggcaccggcagcggcggcgcgggcggaggcagcagcaggcggtaagactccccgcggcggatgcgcgcggaacggatgggcgcgcagggaggaggcaactcgagctgccggccgcagggggcgctaggatgcgggtggggtcggtttggctggcgggggcggagggaattcggctgcgggggcgtctgggacctggcccctggttgtgcgctctacgggaggcttcctgctgaagcccatcctggggtccatttagggggcgccacgctgcgcgtggtgttaacgaggtctgggttggggaagggggctgcacacttaggggtctgtattcttggtgacagtgcagaacagctgctaagctgggaaccacttggagggaccttcctgggggcactatactgagggctagattcgcagtgtttggggtactcttggagcactccataagggggtgcctgctaggaccaggatctttacttcagggtggggtgctctcagggtccttctaggggatggaggactctattgcggggatgttagtggactcctcctgcagcagctggggtcagaaatccagagggtgcctcttgggggagcactgttttgggagccttgcgttagattggagttcccctctcagggcaagagtgttagcgttaagtagctgttcagaggcaggaaacagtggagggggggcgcagtcccagcacagagggaaggagtccctgactgcagaggtgacagcatagtgagggtgcatgtgtgttgagcttggtctcctctgagggtattctccgattgacctccgtttgctccagctgtccgggtatgaccagctgtggctacctcagttgtgtgctctgtgtgagcttctggggtcttgtgatggtgacacgatgactctgtgtcctccagggacagtgtaattgtgacagtgtgactgtgtatttccagggtagtgtgactgtgtgtttctgggacagggtttgcgacagtgactgtgtgtgctccaagaatgctgtgactgtcacagggtgactgtggcctcatgggatgcagtgattgggatagagtgactgtttctgctcctaggacagtgattgtgcaatggtgttggtggtctagggacaatgtgattgtgacagtgtcatttctggcatgcagtgattgtggcactggggtgtttacacttggggaacaatgtgattgagttcgtggaacagtctgtgctccttggacactgtgattgaaacacagtggctgtgtgttagtcttcaccaggtgctcacgtctgagcgtcggtgctctgacatgtggtctgtgttccctctgcctggtgtatcctaagaactggtgtcctctaaccacctggtgttcttagttattgttcctcctctgatggtgctccagggtctgattgcttgtgctccagcgatgtgtgcaactgacagctttgcccgtgtgctctacctggatgccccactgctggggatatcaccaagacggtcagatttgggctccttatccctggagctcctgagtgaggcctctctaagatgtagccctactcttcctaagtctctttgggggtcttcagcagtcattgcagccctccaggccacccccacctctgttctgatcaccccccagccccagtccccctgcacccttctacccaccaggaagcaagtgtcacgggcccagcatacatgggctgacatttcccaaagggaactggagagaggctgaaggaagagaaagttggaatcaacagaaaatgctaaaactggggcagggggccaaactggcacaggtcactgtcctaagacaccaaggggtgggtgaagtgaagtaggttccaggccccatttctttgcaaggctccagggactcctcctagcctggtctctggggcactgagtcttaggggacagtggctgagtggtaataatcatcattattttggtgggtatccatctcgcaatggctcaccctccggctccatgccagggacttttccatatgcatcctcatccccagtgccctgggtattccagcagggtattcctgctggcatatggagaaactggagcccagagacaaaaccctttctcttttttttttttttttttttttgacagagtctcctctgtcacccaggctggagtgcagtggcgtgatctcagctcactgcaacctctgccttccggattcaagtgattctcctgcctcagcctccggagtagctgggattacaggcgcccaccaccacacctgactaatttttgaatttttagtagagatggggtttcaccatgttggccaggctggtctcgaactcctgacctcaggtgatctgcccaccccttagcctcccaaagtgctgggattacaggcatgagccactgcacccagctaaaccttttctctttctcacccaaactcacacaaccaggagatgggggagctggaattgcaacgcaggtccgcccaattcctgtgcatctttgtataagtgtcttgccctctctgagccttaattttccagtctgtagagtggggcttttgttggcactgccatgtgggggtcactttgagggttctgtgagcttggagatgtgtgtaaaggacttaacataatcagtagatctccattcagggacctggactaaggaggggggacctgggtggatcccatttctccagggtgagtagaaaaaaacaggaaccttaaccacatccccacgtagactcgggtttctgtttcactgtgggcctgtgcacccttcagtgtctgtgctgaggtccaaagctgggactgatgggtgggctgtagctggcatcagtgccagggtcctcccccattcccagggaaaaggaggaaggtgtctgatggcaacctcaatgcttagaacaggcatttcttcaaaaagggggtttttaccagggcacatacaggattcagtgctccccacactggagttcatccagctaccgcaaaaggagtccagcgagctcccccgatttgggtcaaaggaatccccagagagagggcactgcccacccccaaccggagatgtcatccaaacctcccctccagacctgaagatgtatgagacggctgagtcacggcacagccacgatctgtcaagaggcagatggagagggaggaagaggaggactttggtggtgggggtggggagctgtctgaactggggacggggccaacatacggaccctgcgtcccccctccctgggccctaaaacttccccatcgaggtgggggcacagtgtggccccaggagcaggtggaggcagccgagctggggtatccgtctggtcgctggtctctgtctccacttgggtcctcgcctcccccttgtccctggcgctcccaagtccctggatgtgggttgggagcgggtctccccgcgcgccctctgctggacgacgaggaaggcacagcctgggtgtgcgctccgagcgcggacctgctccagggacgccgccagtcccggagcaaagcaaagtcgccgccaccgtcgcggcgcccggtattattattttatgcttattgagcgtcctggagagcgggcgccaggccggctgaccgcaggctgcgtgtggggtcctcgccctcccgggcttgggaccaggccgctttccccatgcgccagcccctgccacacgctgcggggactgtcgtctggaggacagggaggaacctggccgaaaagttgcagccgtggagttcccgtcccgcctctgcgcgcttgcccggcaggccggtgaaccccagcatccttggctctgcgcttcctgcccgggaaacagagaccatgggacttgcccaaggtcacacagcgaggaaggtgagaataggagttaaaaaccagatctcggccaggcgcggtggctctgtaatctgagcactttgggagaccgaggtgggcggatcacgaatgaggtcaggagttcaagatcatcctggccaacatggtgaaaccccgtttctactaaaaatacaaaaattagccgggtatggtggcacacgtctgtaatcctagctactcgggaggctgaggcaggagaatcgcttgaacccgggaggcagaggttgcagtgagtcgagatggcaccactgcactccagcctggcagcagagcgagaccctgtctcaaaaaaaaaaacaaaaaacaaaaaacagatctgctccactgcagaccgctgggtaacattcacatggcagccctgcccgctgactcgctgtgtgacttggggtcagtgcttgtgcctctcggagcctcagtttcctcatcagtcaaacggggctgaaaaataagaactgtccacccccagggctgtggtgaggctgatatgtttgacgtaggtgctgggcagccaggagctggtgttctgagaaagtacttcctcaaatgacatcagcagagagaaagggggcgtcccccaaaccgcaaacccggctggtggggaaggtgccccatatttcattggtaacagattgactgcaggctcttatgactttaggaaaactggggctttggacctgggagagccacagtctggcagggtgagaacagaattgtgagggcatctgagcccactcttttcattgtggagtatgaaagagttcaaatctggctgggcgcggtggctcatgcctgtaatcccagcactttgggaggctgaggcgggtggattatttgaggtcaggaaattgagaccagtctggccaacatggtgaaaccccgtctctactaaaaatacaaaaattagccaggtggtagtggtgcatgcctgtaatcccagctactggtgaggctgaggcaggagaattggttgagcctggaaggcggaggttgcggtgagccgagattgggccactgcactccagtctgggcgagagactgagaccctgtcaaaaaaaaaaaaaaaaaaaaaaaaaaaaaggaaggagggaaggaaggaaagaaaagagttcaaatccacttttggccaggcgaggtggctcacacccagcactttgggaggctgatgtgggaggattgcctgaggctggagtttgagaccagcctgggcagcatggtgagaccctatctctacaaaaagaaaaaaataaaagaagtaaatccagcttttgtcctggactcgctgtgtgaccttcacctgtcagagcctcagtctcctcatttctagcagattcgttcattccacaaacactgagcgccttcagaactgtggctgagaatgctgtagaccaagtttgtccaacccgtggcccaggatggcattgaattcggcccaacacaaattcgtaaactttcttaaaacaatgagattcttttttttttccctctcattagctattgttagtgttagtgtattttatgtgtggcccaagacaattcttcgcctttcagtgtggcccagggatgccaaaagattgcacacccttgccatagacacattccctgctgccctgaaattgtcagactagagggtgaagcagaaatagcaagtaaagggctgggtgcggtggctcaggcctgtaatcccagcactttgggaggccaaggcaggtggattacttgaggccaggagttcgagaccagcctggccaaaacctggcaaaaccctgtctctactaaaaatacaaaaattagctgggcgcacgcctgcaatcccagctacttgggaggctgaggtgggaggaggattgcatgaacccaggaggcggaggttgcagtgagccgagattgcgccacttcactccagcctgggtgacaaagccagactccgtctcaaaaaaaaaaaaagaaatagcaagtaaagctgtatgataattcaagatggtcacacataggatatgaaaaaaagagggatcctgaggtcagggaaggcctctctgaggaggtgacatttgaacaaagacccaaataaaatgagggaggtaagggccgggcgcagtggctcacacctgtaatcccagcactttgggaggccgaggcaggtggatcacgaggtcacgagttcaagaccagtctggccaggatgttgaaactccatctctactaaaaatacaaaaattagctgggcgcagtggcaagtgcctgtaatcccagctactcaggaggctgaggcaggagaactgcttgaacccaggaagtggaggttgcagtgagccaagaccgtgccagtgcacttcagcctgggtgacagagcaagactccgtctaacaaaaaacaaaagagggaggttgctacatgggtgtctgatggaagagggtgccaaccagagggaagagccagtgcagaggtcctgtggtgggagtgtgtctgatacgttggaggcaagtgtgtctgaggcagagtgagcgaggaggcagtggaaaaaaaggagggagcgaggtgacaggcagctcatgtaagggctcatagaccattaggccatgatcaaggttggctttaggcctcagtttacatctggcttcctaggacgggacaagcatcattgggctggaaggaaactcatccataaagggcttgtgtagcctcatggctaaaattcctgtctctgaagccagacagctgggtccataatccagctctgatctttctagattgggagaccctagccaagtcactcctctctgggccttggcttccccgtctctgaaatgggcctagtaaaaaccgtattcccaagggctgatctgacgaactggcaaaacaattcagggaagctaagggcattgaaaccttggtcggtgaacaaaaatgcatttctgggacaggtatagtggctcatgcccaacacactttgggaggctgagagggaggcggatcacttgagcctgggaggtggaggttgcagtgagccaatatcatgtcacttgcactgcagtctgggtgacagagtgagaccctgtcaaaaaaaaaaaaaaaaaaagaatatcacctggtgggtgtctggtgggtactttgtgaggattaaatgagatcataagaccaagtgtggtggctcacgcctgtaatcccagcactttgggaggccaaggcgggcagatcacttgagtccaggagctcaagaccagcctgggcaacataggaaaaccccatctctagaaaaagtacaaaaaattagtcaggcatggtggcgcacatgctactcagctacttagctgctcaggaagctgaggttgaaggatcacttgaccgcaggaagttgagactgcagtgagctatgatcgtgccactgtactccagcctcgatgacagagtgagatcctgtctcgagagagagagagagagagagagagagagagagagatattgagagagagagagagagagagatcatagctagaggcactggatgcacaggaagctttctaaagggttagttgctatcatcaccatcatcgtcattatcatcatcatctataccctctagctagtatagtgatttgcatattataagccttcagtaaatatttgtcaaatactgataataactgtagctcatattgagtgcttactaggttcagacacttttctgagctttttatgtgtccatccatggggtgagtggtagtattatacccattttacaactggggaaactgaggctcaatgaaatgaagtgactagcccgagatcaaatggctaagaagtgccagaggccacacgcaagcccaggcttcctcactctgggccccatggcatcagagccaacactagagaaggaaggatatttcacagaggtggactcgaaaatagagattcactgttgggcgcagtggctcacacgggtggatcacttgaggccaggaattcgagaccaacctggccaacatggtgaaaccccatttctactaaaaatacaagaaaaatttgccaggtattgtggcacatgcctgtaatcccagctacttgggaggctgaggcacgagaatcctttgaacctagcaagcagaggttgcggtgagccaagatcgtgccactgcactccagtctgggtgacagtgagagactgatgaaaaagaaagaaagaaagagagaaagggggaaagggaggaaggagaaaggaaaggaaaggaaaggaaggaagaaatgaaggaaggaaggaaggaaaataaggaaaggaaggagaaaaggaaaagaaagaaagagagggacggaggggaaaggaaaggaaaggaaagaaggaaggaaggaagaaagaaagaaagaaagaaagagaggaaggaaagaaagaaaagaaaatagagattcaccctcttttctcttttttttcgtgagacagggtctcactgtctcaagatggtttagtggcaccttcataactcactgcaacctcaacctcttggctcaggtgatcttcccacctcagcctccaaagtagctgggaccacaggctcatcccactatgccctgctaatttttgtcatcttttgtagagatgggatctcgccatgtcacctgggctggtctcgaactcctgggctcaagtgatccgcccaccttcacctcccaaagtgctgggattacaggcatgagccaccacacctgccttctaggggtgtcttaagagttgtaagacacatctcagaagctgtgggtggcattctaggttgtccccaaggactgtggggtgcatcttgggattctgttctagggtgtgagactgtcttaggagctggagaggaatctagttgtgtccctggggtctattggggcaccccagattttgctggcatctccatggttactagggcatcccctgagtctgaaggcattcccgaggttgtcttggggtctcagcacttgtgggggcatctcagagatgctgtagaaccattcagggattaagggacatctgagggactgtggaggtgttcctggggtctgtggagaactctaggatttggtgggaacctatattcggtctatgaaaatggctctgtgggtgtgggggattctgggggtactgagggagggtctatgcatgatgggatgatgagagttggggatgatggggagctctggaggaattttgggacatctgaggaactgtggtgggggttctgggatctgaagggttttccctgggctctcagagcaccactggcagggagtttgtgggagtgcccccagagatttgggggcatccctggcatttgtggatgcaccctgggattctcagggcactcctggggcttgtggcatgtcccagaaacagtgagaatactgctaggattatgggggcatctggagagctatgagagtgccctagggtttatgagggtgtctcagaacacctctaagttgtgctgagaagccccgggatttgggggggtacccctggacttcttgtgtggggttgtctcagggacaatgagggtgctccttgggattctgagagactgtggggtggctcctggggcttgtggggcctgtcaacaccacggggagtttgcaggagtgtccccacagatttgggggtgtccctggtgtttgtggggacgcgtccggcgattgtgaggacattagagccaacgcgggcggctttggggtctgcgggagagtccccaccagagccgtgcgggcgccccagacccgccccgccctgggggcggctccagcgcgaagccggaagggccgaggcgacagggcggggtggggcccgcgggcccggggctgggcaggcggcctgcgtgggcctggcggggtgggcggcgcagctccccagcgcccgccgaggcggggccgccccgcggccatggcgcggccgcgcggcctaggccgcatcccggagctgcaactggtggccttcccggtggcggtggcggctgaggacgaggcgttcctgcccgagcccctggccccgcgcgcgccccgccgcccgcgttcgccgccctcctcgcccgtcttcttcgccagcccgtccccaactttccgcagacgccttcggcttctccgcagctgccaggatttgggccgccaggcttgggctggggctgggtaagtgcagcgctggtggccgtgggttcaagtcgcccctggccacctggcgcactccagggtctagggttcgtggctcactctctccagcctcactttcctcttctgtcacatagcagcgatcaaaatcatccctgaccgccagggttgccctggagacctctgatagggcatgcagtagacgtttaataaatgttgcatccttcccacttcctgtgcaaacctgaagctgcggtcacgctttggaggagtgagggcgacctgccatccaggtcatgtgttcatcctggggtatgtgttcagttctgtcagcctcagtctactggcctgtgaaatggggccagtcatgccttctgtgggtggccttgcggtgaggcttggtgtcactcctagtaccgggccacagagggcaaatggaagttccctttctggccagacggggtgggctgcgggggcttgaagtctgggagtgacaggccccgaggccacatccagtctggctttctaatgtccttatatcctggaggcagaagttggcagcccggagttgggcactggctggccctgggggcttctccgggtcctcagcctccccctcttccacctactttccacgtgcaattgaggcacagactgaaggagggcacggcggggcaggaccgggcccagcgactggccccaggaacgaaatggggcggggacagaagaggaagaggggccagggcctttgggagccccgcgtggggtccgcagggtgtgtgtagggaaatcgttgcttctctccgggtctctctctctgcgtcctgcgtctctgtctccacttctgtctcttctgtctctgttttgtttctccttcccaccgctgagctgcaccttcccctcccctgggtttatgtcacccggccccacactcgagtcccgtttccccgggggcgcacggcgatcagcgatcagagacctcgagcgggcccagctcgacgtcagggcggggaggggggaaaggcggggccggaggcggtggcaggagggcgggcccggagccgggaaaccggagccccggggcaccccagaggcctaggagggaggagacgggggggggggggggaagtgtgcgtccgactccgcaggacccctgcagggggaggcagacagagcgcccgtgcgctcccctcccccgtgcagacccgggaacgctcgaccgcccggggctgtccctgggggggtcaccagaggcgtggaggcggtgccggcagtggaggccgcagacaccttgggcctggccagcagcgcgcgccacaccgccctgccgccgtccccatgcgcgccccgacgacggcgcttggctcccatgcgctccggtgcagcgccccgggcccggccccggccccctgccctggcactgccccccacgggccccgagtccctgacccacttccccttcagcgatgaggacacccgtcggcaccctccgggcagatctgtcaggtgggtggcccgtggccagtcagtcctctcttttaatactgaagggcactggctgtgctgggggggtgggggtgctgagtctacctgggtgagtcccctaagtggcttccaggatctggctggggccccaccccctttcctggctctaaaggcctggggtgctgctgagggcttcttgaaggtggcagccctcaaagtgggtgctgggtccattcctgcctatccaaggtaggacccgtcaccctctttgtgtccttaaacctgagcttctggcattcactttggctgcaaatatgggtgtccagcgtcacctgggctccactcccaggccactggcctagaaccagatccctaagtccctgcctggctcagtgtctccagccttaccttccccaccccctctcatgctggagctgccaggctgaaaaccaagctgggttgggggtggggaggggagattctgggtctcatggagggtgtttagaataggctggactgagctggggctgtgagtggcctttaagttctcagaattctcaggggtttctagccttgttcttgctttcctgctccatggtctctaacacagacacacacacagggccgcacacagggcaatccgggtcacctggtgtttaccgtactaggtatgggtctcctggctgcaccaagaggaccctgcagttgactcatggccacacacaggtgacacacagaccacagcaaccctggcccagccctcgcacatcctcgtctacactgcgttcctccacagtgggggacactgtattttggtgagacacattctcacaaaaatacacacccagggcccacacatgttcctgtatgctgtactcccacctgcaccagatacacacaggaacgcaccccgtgcccacacaggggtcagggactgtcacagtatcagtgcgacacggtctcataaagtcacccagactcagaaatacacagataaagacacagagatgcacacaggcacccatgagcacccagcccctgctcacacaggcagatgtgcgatgccacagagatgtctatgtgtgatgcccgggggcacacagacctccctctcccccagtctcttacatactcagccccccaaagagctgtgtcacctggcactacgcgcctgcctgggagacacacaccagcacccgccttcaacctccatgtgaccttcacaaagcaaatgccaggcctttccataaaggctgcctggcaccacctacaagtgagtcaggtggaaaagcacggggagccgggggagacaccaggcctgcctgccctgtgcgccccgggggaagacactcgtcgcagctttgtagctcagctgcctgggttcaaatccacattctaggccgggcgtggtggctcatgcctgtaatcccagcactttgggaggctgaggtgggaggatggcttgagcccaggagtttgagaccagcctgggcaacatagtaaaacctcatctctacaaaataaataaattttaaaagaaatccatgctctgctactaataaccatagtatttatcctttatgtgcctcagtttctttctttcttccttccttccttcctttctttcttcctttccttctttccttctttctctctttcttcctttttttttttttcagggtctcgctctgtcacccaggctggagtgcagtggagtgatcttggctcaatgcaacctctgcctcccgggttcaagcaattcttgtgcctcagcctcccaagtagctggcattacaggtgtatgccaccatagcccagctaatttttttgtatttttagtttagatggggtttctctatggtggccaggctgatctcaaactcctggccctaagtgatccatccaccttggcctcccaaagtgctgggattacagacgtgagccaccgtgcctggcctcagtttctttgtctggaaaatggagcattaatgcatgttacagtatagcacaatgcctagcatgtggtcttcacataagtttgttttttttttctttcttgagatggagtctcactctgtcacccaggctggagtgcagtggtgcgatcttgcctcactgcaatctgtgcctcctgggttcaaccaattctcctgcctcagactcccaagtagctaggattacaagcgccccgccaccacgcctggctaatttttatatttttagtagagacaggtttccccatgttggccaggctggtctcgaactgctgacctcaagtgatctgcccgccttggcctcccaaagtgctgggattacaggcatgagccactgtgcccagctttttttttttttttttttttttgagacagcatctctatcatccaggctgggatgcagtggtatcatctctgctctctgcaacctctgcttcccaggctcaagcgatgctccaacaggcatgagccacggcgcctggccatagttcttgttattataatctttaccaatgtgttcgtttcccccgcccccgctccctagcttgtttgtgtcccgtcagtccctgcagtagtcatcccccaaggcctagactctccctgggctgcatagccctcaacaagcccaatttcatgctcccaaaagccctggtgggaaggcctaggggccacgtggagggggaaacaggtagcaacttcatctgaaagtgtcaccaaatgatcagcctgaggccagatgcagtggtcatgcctataaacccagcattttgagagggcgagactttgggaagcagattgcttgagtctaggagttcaagaccagcctgggcaacatggtgaaaccccatttctgcttaaaaaaaaaaattagctgggtgtggtggtgtgcgcctgtggttccagctactcaggaggctgaggtgggaggatcgcttgagcctgggaggctgaggctgcagtgaaccatgatcgccccactgcactgcagtctgggtgacagagcaagaccctgtatcaacacacacacacacacacacacacacacacaaacaaacaaacaaaaaacaatgattagcctgcctaagagggagtcttgggcgggtcacttcacctccaatggagcgtctgggcatgtggctgtgatgtaaggctggcagctacccctgtgtctgggttgcaaccttgggtcccatggggatgttgctggagtggcctctggcctaactttgggccaccctgagcagtcagtggcaagccagggaggggtgactctccatggctcagggatctgattctggggcatcactggccctgactctcccctatccccaccagctcccaggcagcagttctatagccctgtcccctcccctctgtcctccctcagcccaggggacatcgggtcttgaaacagaaacagcagggccccagggagtgtcctcttcccatccaggcctctgggctcctgctgacgtgagctgagtcccttggggctggtggatgtgccaggatgtgctagctgggcacctgcttgggaacagagtctcaccatcctaaactgcagcttaaatcctaggccggggagttggaggtgtgtagctatgttcctctcgccttctctggagctgaaaaaaaatccaccttaggagacaggacacagttctcagacaatgaagccaccaaccccttgtctccttatgccatgggaatgttaacaggacttatatgttgccaggcgcagtagctcacacctgtaatcccagcactttgggaggccgaggcaggtggatcacctgagatcgggagttcaagaccagcctgaccaacatggagaaaccccgtctctactaaaaatacaaaattagccgggcatggtgatacatgcctgtaatcccagctactcgggaggctgaggcaagagaatctcttgaacctgagaggcggaggttgcagtgagccgagatggcgccactgcactacagcctaggcaataagagcgaaactccgtctcaaaaaaacaacaaaaaccaggacctatatgttaacttatagagtgggttggagccctctgtcggttaatgtgtataaagcactttcataatgccaggcacacagcaagcattcaataaatgtcttgttattattactgtatgcctgaaaggatctaacctggcacccaggacacagcaggtgctcaacaaatggacactattggctgggtgcagtggctcacgcctgtaatcccagcacactgggaggctgaggcgggtggatcacctgaggtcaggagttcgagactggcctggccaacatggtgaaacccgtctctactaaaaatacaaaaattagccaggtgtagtggcgcacacctgtagtcccagctactcgagagactgagtcaggagaattgcttgagcccggcagcagaggttgcagtgagctgagatcacatcactacactccagcctgggtgacagagtgagactccatctcaaaaataaataaataaataaataaatggacattatcatcaaaggtccaagctgatgatctatgattatctcaccttaagaaccttaagagtggctttttttgtttgtttgttttttgagactatcccctaggctgcagtgcagtggctcgatcttggctcactgcaatctccacctcccaggatcaagtgattctcctgcctcagcctcctgagtagctgagatcacaggcgcacaccagcacgccaagctaatttttgtatttttagtagagacggggtttcaccatgttggtcaggctggtctcgaactcctgatctcatgatctgcccgccttggcctcccaaagtgttgggattacaggcgtaagccaccgtgcccggcctttttcttttttttttgagatagggtctcactgtatcacccagtctggagtgcagtggcatgatcacagctcactgcagcctccaaatcctggtctcaagcaatcatcttgcatcagcctcttgagtagctgggactatacacatgcaccaccatgctcagctaacttaaattttttgtagagacagggtcttgctatgttgcccaggctggtctcaaactcctggacttaagtgatcctcccacctcagcttctcaaagtgctgtgattataggaatgagccattctgcttggcccattttatccattttcgagtgtatagttcagtggcattaagtacattcacattgttgtgcaaccatcaccaccatccatctccaggactgtttttttttttttttgagacagggtctcactctatcacccaggctggagtgcagtggcatcatcactgctcactgcagtctatacctccagggctcaggtgatcctcccacctcagcctcctgagtagctgggaccacaggcgcacaccatcatcatgccttgctaatttttttcattttttgtagagatagggccttgccatgtttcccaggctggtgttgaactcctgggctcaagcaatcctcccgcgtgggcctcccaaagtgctgggattacagatgtgagccacttcacccagcctccaagactttttttttttttttgagacggagtctcgctctgtcgccaggctggagtgcagtggcgcaatctcggctcactgcaaccttcgcctcccgggttcaagcgattctcgtgcctcagcctcctgagtagcttggattacaggcacgcaccaccacacccagctaatttttgtatttttattagagacggggtttcatcatgttggccgggatggtctcgctctcctgaccttgtgatccgcccgcctccgcctgccaaagtgctgggattacaggcgtgagccaccacacctggccaggactttttaatgttctcagactgaaactttaagcacaaacacaccatttccctatctcccccagccgctggcacccactcttctactttctgtctctgagtttgagtactccagggacctcatataagtggaatttcctgtgcactatttgtctttttctgactggcttattttactgagcataatgtttttttgtttgtttgtttgtttttgagacagagtttcactcttattgcccaagctggaatgcaatgtcccaatctcggctcactgcaacctccacctcccaggttcaagtgattctcctgcctcagcctccgagtagctgggattacaggcatgtgccaccacgcccggctaattttgtatttttagtagagacagggtttctccatgttggtcaggctggtctcgaactcccaacctcaggtgatccgcccacctcatcctaccaaagtgctgggtcactgagcataatgttttcagggttcatccatgttgtagcctgtgtcagaattcctttcctttttaaggctgaattctattccattcaatggatataacacattttgttgatccattcatctgttgatggacacgtcagtcacttctaccttttggccatcgtgaattacgctgctgtgaacatgggtgtacatgtatctgtttgagatccccactttcaattcttttggggatagacctaggagtgggattgcgcggttgtgtggtgattctacgtgtttgtttgttttgagggttttttgtttgtttgtttggttggtttctgacagagtctcattctgtcggccaggctggagtacagtggtgtgatctcggttcactgcaacctccgtctcccgggttcaagcaattatctggctgcagcctcccgagtagctgggactacaggtgcctgccaccacgcccacctgatttttgtatttttagtagagattgggtttcaccgtgttggccaggctggtctcgaactctggacctcaggtaatctgcccgcctcggcctcccaaaatgctgggattacaggcgtgagccaccgcacctggcctacaaacatttttgattggggttacagtggttctctcaacagcaggtaggaatggattgtttgtgagtggggaggaatcggagcagcagagagacctggttggaatggagagtgcagcaggtgagagaggaggtgttgtgacctcagggatgcgaagagtccaggccttcaataaggtctgtctctggaactcaaatctgaggcccaggaggcgggtcagaggctgagagacggggtggatggaggtaggagtgcctcctggctccacagtcccttctcttggagtgaagagaccagctgtctggaggggagagcaactgggaaacaggacacgggtaaaggccagttacaagtggcatcctggagagaaggtggctcaggacacagctgtccccaaaataccctccttggcattgcatgcaggggatggaggaaccctaagatcttcaaaagtaaaaggcccttcaggaaccatcctaataggcgtgacatggtatctccttttttttttttttttttttgagacggagtcttgctttgtcacccaggctggagtgcagtggcgtgatcttggttcactgcagcctctgccacccgggttcaagcaattctcctgcctcagcctcccaagtacctgggattataggcacccaccaccacacctagctaatttttgtatttctagtagagacagggtttcggtatgttggccaggctggtctcaaactcctgacctcaagtgattcacccaccttgcctcccaaagcgctgggattacaggcatgagccacctcaccagacctgtatctctttcttttgatttgcgtttccctgatgagtgatgttaaggattttttttcatatgtttattggctgttttaatatcttttctgcagatatgcctattcaagtcatttgcctattaagtcaaattatttacaatttattatttattattttgagacagggtctcactctgttgcccaggctggtgtgcagtggcacgatgtcagctcactgcaatctctgcctcccgggtttaagtgattctcccacctcagtctctctagtagctgggattacaggtgagagccgccatgcctggctaattattttatttatttatgtattttttgagacagagtctcgctctgtcatccaggctgaagtgcaatgtcgcgatctcagctcactgcaacctccaccttccgggttcaagcagttctcgtgttttagcctccccagtagctgggattacaggcacatggcaccacgcccggctaatttttgtatgtttagtagagacagggttttcactgtgttagccaggatgggctcgatctcctgacctcgtgatccacccacctcggcctcccaaagtgctgggattacaggcgtgagccaccacgcccagccaattttttttttttttttttggttgagacggggtttcaccatgctgccctggctggtttcaaactcctagactcaagtgatccgcccacctcggcctcccaaagtgctgggattactggtctgagccaccaggcctggcctatttatttttgaaacaaagtctccctctgtcgtccaggctggagtgcagtggtgcgatcacagctcactcactacagcctcaaacatcccaggctcaagtgatcctccagtcttagcctcccagtagctgggactgcaggcacacactgccatgcctggctaattaaacaagttttgtttttttgtgttttttgtttctttgtttctttgtttttgagtagctgggactataggtgcacaccaccatgcccggctaatttttgtatttttagtagagacggtttcgccatgttgtctgggctggtctcgaactcctgacctcaagtgatctgcccgcctaggcctcccagagtgctgggattacaggcgtgagccaccgtgcccagccctttttttttttaagagatggggtctcactatattgcccaggctggccacaagctcctggtctcaagccatccttccacctcagcctctgttgatacacaaaagtctttcattttgttgaagtccacttgtttgttattgttgttgcctgtgctttggtgtcaaattcaagaaatcattgccagatctaatgtcatgaagctgctaagagttttatagttttggctcttatgtttaggtatttggtcattttgagttatttttttttttttttttttttttgagatggagtctcgctctgtcatccaggctggagtgcagtagtgtgatctcggctcactgcaacctccgcctcctgggttcaagggattcttctgcctcagcctccggaatagctgggattacaggcacccaccactacgcccggctaatttttgaatttttagtagagacggggtttcaccatgttggccaggctggtctcgaactcccgacctcaggtgatctgcccgcttcaggcctcccaaagtgctgggattacaggcatgagccaccacgccctgccttgagttaatttctgtatgtggtccacctcttcagttttcccagcaccatcgttttgaaaagacagttctttccccattgagtagtctctggggttagactagtaggtagatttcaggctatgctctgagtgggtgcaagtggagagggagagaggataggaaccccccgcttcccctttctaggtcagcctatagagagtcaccataagactttactggaatggtctctctactaagaaataagtttgaaatctcctaggcctgccaggcacctataatcccagcactttgggaggctgaggtgggcagatcacttgaggccaggtgtttgaaaccagcctggccaacgtggtgaaaccctgactgtactaaaaattcaaaaattagccagatgtgctggtgcatgcctgtaatcccagctatccgggaggctgaggcaggagaattgcttgaacccgggaggcagaggttgcagtgaaccgagatcgcgccactgcactccagactgggcgacagagtgaaatcctgtctcaaaaacaaaacaaagcaaaacaaaaatgtataagaagacacgctttaggcatagcgtttcatgtctgtaatcccagcactgtgggaggccaaagcgggaggatctcttgagcccaggagttacagactatcctgggcaacatattactattactattattaccttattattataattacttattacatattaccttattactattattacatattaccttattactattattacatattaccatattactattatcacatactactaatatatgtaatattactaatattacatatataatatcagtaatattatatatagtaatattatatacatgcatgtaatattagtaatagtgcatatacatgtatgcaatattagcaatattgcatatgcatatataatactagcaatattgcatatgcatgtgtatgtaatattagtaatattacatattacatattaccaatattacatattacctattactacaaaaaattcaaaaattatctgggtgtggtggcacgtgcctatagtcccagccactcccgaggcttaggtggggggatcgctagagtccaggaggctgcagtgagctatgatggttccactgcactccagcctgggcaacagagtgagaccccatcactaaatgataagctgcaaacttggagaaaaatacatgataagggatttgtatccagaatatataatgggccagccatggtggctcacgcctgtaatcccagtgttttgggagcccaaggcaggtggatcacttgaggccaaggtgagggcattgcttgagcccaggtgttccagaccaacctggacaacatggcgagaccccatctctacaaaaaatacaaaatttatctgggggtggtggcatgtgcctgtagacccagctgcttgggaggctgaggtgggaggatttcttaagccagggaggtggaggttgcattgagctgagattgtgccattgcacttcagtctgggtaagagagtgagaccctgtctcaaaaaaaaaaaaaaaaaaaattagctgagcttgctggcgtacacctgtagtcccacctacttgggaggtggaggtggaggatagcttgagcccaggaagttgaggctgcagtgagctgggattgccctacaggactccagcctgggcgatagagcgagatttcatctcaaaaaaacaccaggccaggcgcagtggctcatgcctgtaatcccagcactttgggaggccgaggtgggtggattacttgaggtctggagttcgaaaccagcctggccaacatggtaaaatcccatctctactaaaaatacaaaaattagccaggtgtggtggcaggtgcctgtaatcccagctactcgggaggctgaggcaggagaattgattgagcccaggaggcagaggttgcaatgagccaagatcgcatcactggactccagtctaggtgacagagcaagactgtctcaaaaaaaaaaaaaaaagataaatatagattatgtcaagtaagtagtgggattttagtttgtgtgtgtgtgttttaaggaagagaaatagtattgggctgggcacggtggctcacgcctgtaatcacagcactttgggaggtagaggtgggcagatcacctgaggctgggagtttgagaccagcctgaccaacatggagaaaccccatctctactaaaaatacaaaatgggctgggcatggtggcccacacctgtaatcccagcactttgggagcctgaggcaggtggatcacctgaggttggaagttccagaccagcctgactgtgtctactgaaaatacaaaatttgccaggcgtggtggtgcatgcctgtaatcccagctactcgggagactaaggcaggaaaatcgcttgaacccaggaggcggaggttgcggtgagctgagatcgcgccattgcattccagcctgggcaacaagagtgaaactccatctcaaaaaaaaaaaaaaagtattatggttgaaattttagctgggttggtcaggggaggcttctttgtggcagtgacatttgagcagaggcctgaaggagggaaagaggagccgctgcaaatctgggctggagaaacagcctgtgcaaaggccctgaggcaggactgtgtctgagattttttttttttttttttgagatggagtcttgctctgttgcccagactggagcgcagtggcaagatcttggccctcactgcaacctccgtttcctgggttcaagtgattctcctgcctcagcctcccaagtagctgggattacaggcatccaccaccacgcctggctaatttttgtatttttattagagatggggttttgccatgttggccaggctggtagagaactcctgaccttcagtgatctgcccaccttggcctcccaaagtgctgggattacaggcatgagccacctcaccccggcctgtgtctgagatttttagggaacagtgaggaggccattgtggctggagcagaatgagtgaggggggaagggaaagtcgtgggacaggacctgtgagctgcagtgaggactttggattttgcccagagtaaggtgggatccatcgaaggttctgagcagagggaggacttgacctcattcaggtgtttccaagctcgccctggtggccactgaagaaagactgggggttgaaaacaggaggtgggtactagggcagaggtgaatgcaaccagtcctggctgagggaagctgaccaaggagtgggtgagaagtagacagattctggatagattttggcaccaaggctgatttgaggtacgaaggaaagagtgaatgatcccataaattttggccttggggtgtccccagcacagcagtggggatggatgcacaccggtgctcaagttccatctttgcaattctgtgtctcccgtctcttttagggcatctgtctttctttaacatcctccacttggttgggcgcagtggctcaggcctgtaatcccagcactttgggaggccaaagagggaggatcacatgaggccaggtgtttgagaccagcctggccaacatggtggaaccccatctctactaaaaatacaaaaattagccaggtgcggtggtgcatgtctgtaatcccagctacgcaggaggctgaggcagaaaaatcacttgaatccgggaggtggaggttgcagtgagccaagatcacaccactgcactactccagcctgggccacagagcgagaccatacctcaaaaaaaaaaaaaaaaaattctccacctgaatgtctgccaggaattcccttaggctcctcatcccacccccacctttttttttttgagacattgtcttgctctgtcacccaggctggagtgcagtggcacgatcttggctcactgcaacctccgcttcctgggttcaagtgattctcatgcctcagcctcccgaatagctgggattacagacacctgccaccatgcccggctaatttttgtatttttagtggagacagggtttcatcatgttggccaggctggtctcgaactcctgacctcaagtgattcacccccacttggcctcccaaagtgctgggattacaggcattacaggcgtgagccaccgcacccggcctcctcattcctcttgacctccctaatagcgtttcagcctcctgacccctcttctcgcccatcccctgcagcttcgaggcagagaatgggccgacaccatctcctggccgcagccccctggactcgcaggcgagcccaggactcgtgctgcacgccggggcggccaccagccagcgccgggagtccttcctgtaccgctcagacagcgactatgacatgtcacccaagaccatgtcccggaactcatcggtcaccagcgaggcgtgagcatccttctccccacatgccagttcccccaggcctggtcctgctggaagctgcccttcccagcagggagtcggggggcacccacccctatcctcctcagcactcccaacctgtcctccccagtgaagggtaagcagcaccctgcccctcctataaagggctcagttcctttttttttttttttctttttttcttttttgagacggagtctcgctctgtcgtccaggctggagtgtagaggtgccatctcagctcactgcaacctccgcctcctgggttcaagcaattctcctgcctcagcctcccgagtagctgggactacaggcaccagccatcatgcctggctaattgtgtatttttagtagagacagggtttcaccatgttggccaggctggtctcaaactcctgacctcaggtgatccgcctgccttggcctcccagagtgctgggattacaggcgtgagccaccgcgcctggcctcagttccttttttttttgagacggagtgtctctctgttgtgttgcccaggctggagtgcagtggtgcgatcgcggctcactgcaagctcctcctcccaggttcacgccattctcctacctcagcttcccgagtagttgggactacaggcacccgccaccatgcctggctaatttttttgcattttttagtggagacggggtttcaccgtgttagccaggatggtctcgatctcctgacctcatgatctgcccacctcagcctcccagattgctgggattacaggcatgagccaccgcgcctggcctcagttcctttttttctcttttttttttttttttttttttttttgagacagaatctcacactgtcgcccaggctggagtgcaatggtgcaatctcggctcactgcaagctccacctcccgggttcatgccattctcctgcctcagcctcctgagtagctgggactacaggtgcctgccaccacacccggctaattttttctatttttagtagagacggggtttcaccttgttagccaggatggtctcgatctcctgacctcatgatccgcctacctcggcctcccaaagtgctgggattacaggtgtgagccaccgcgcccggccctcagttccttttttaaaaaatataatagtgatcgggtctcactatgttgcctagactggtctcaaactcctgggctcaagcgatcctcccacctcagcctcccaaagtgctgggattgcaggcatgagccaccctgcccgccctcagttactttatagcatgtccagccagaaaggtgtgagtgcccacccactgtatcctcccacagtgtgtacatctcacctgacccaccctctgcccttcctccaggttttcctaagctaacctcccttatcgtgacacttgttgaggtgtgagttccccctgaacctgctcagcctcttcctctctcactgggttcctccaggcctttccaccagccattgctgtacacacctcaacccacttggtccccttcctgttcactgctcccctcatcaagccccgcccttgcaacatattcacctcgggtcaggcttggaagctcacactcataatcctagcacatttggaggctgaggcagaaggattgcttgagctcaggattctgagaccagcctggccaacatagcaagacttcatctcttttttatctctctcttttttttttttttgagatggaatcttgctctgtcaccaggctggagtgcagtggcgcgatcttggctcactgcaacctctgcctcccgggttcaagggattctcctgcctcagcctcccaagtagctgagactacaggcgtgcgtcaccacacccagctaatttttgtatttttagtagagacaaggtttcaccatgctggccaggataagatgtcatctctttaaaagaaaaaataaataaataaaaaggtcaggcacggtggctcacgcctataatcccagcactttgagaggccaaagtgggtagattgttccaggccaggagtttgagaccatcctggccaacatgatgaaacccagtctctactaaaaatacaaaaattagtggggcgagaggcacatgcctgtaatcccagcttcttgggaggctgagacaggagaatcgcttgaacctgggaggcggaggttgcagtgagctgagatcatgccaccacactccagcctgggtgacagagtgagactctgtctaaaaaaaaaaaaaacacccaaccatattcacctctcccctctccccttttccactttgtctcttctccccggacctacctgagccacactccttgactgccatttcttccacgatcagccctggacacatatccacccttatgcagtacaagtgttctttccctaggtcccacagagtcccctccctccctctcagcctccctgggtccagcctcacagggcatctaccccagacagttgcttctctgcggacccctgacctgcctctgtcctcaatcacaggcacgctgaagacctcatcgtaacaccatttgctcaggtgagacctcttcccaaatggttaaggagagaaggggctccaatgctccgccacacttggggacagggcccagccccgctgcctctctaggggaaccccactcctcactgccgctccccatcccaggtgctggccagcctccggagcgtccgtagcaacttctcactcctgaccaatgtgcccgttcccagtaacaagtaagtgaaggctgggctgcaacagctgtgatcataaggtgaagcatatgcgggttctgctctcagccctgctgtgtgacctctggcaggcaggtgacctctctgaacctctgttcagacaacagctcccagaaagccagagagccattgcaggtcaagtgcctaagacacagaggtgttttttgtttgtttgtttgttttttgttttttgtttgtttgtttgttttgagatcaagtctcactctgtcacacaggctggagtgcagtagtgcgatcttggctcactgcaacctctgcctcccgggttcaagcaattctcctgcctcagcctcccgggtagctgggattacaggcatgcaccaccacaccgggctaatttttgtatttttagtagagatggggtttcaccatgttggccaggctggtctcaaactcctgacctttggtgatccacccgcctcagcctcccaaagtgctaggattacaggtgtgagcctctgcgcccggcccagaggtttttataaataaagatttaggggtctggatgcatggtggtgaggccacagccacagtccccaggcccaccctgggtcttgacaccaagttgctgggcaaatggcattccatggtgcttctgttgcccttctgcaaagtgatgatcacagccaagcgtgctggctcatgcctgtaatccagcactttgggaggccaaggcaggaggtcacttgaattcaggagttcaggaccagcccaggggaaacaaaatgagaccctgtctctaaaaaaaaaaaaaattagcccagcatggtggcatgtgtctgtggttcccacctacacagaaggctaaggcaggaggatagttttgagcccaggaggttgaggctgcagtgagctgtgttcccaccactgcactccagcctgggtgacagagcaagaccctggttcaaaaaataaatagataaataaagtgaggattacaataatgcctcccttagataactgctgtgaggagaggagatgatgtctagaaagtgctagaatattgccctgcgtacataggagtggatcttaattgtttcagtgcaagagatgtggctgagagctgccagtccttctgggggtgggggatagagacatccttaggggcttggaggatttgtggagagttaggcaagagagcagagatcttggaagcccaggacctgaccttaaggcggatcagccatgtggtcttgaagaagctgtttcacctccttgagcctcagtttccacatctataaaatggatttttctgggactcattgaggctgcaggcagagtacatggcagcgtccttaggacacggtgagttttcagacaaatgaaaattggcactgttcatgaaagcgggaggcagggacctggtggggggacccaggctgacattgcagccccatttttttttttctgcaggcggtccccgctgggcggccccacccctgtctgcaaggccacgctgtcaggtagctaagcccagaggggtgggaaggggccccccttgctgccccagtgggggtccctcagccccttccccacccagcagtccactcacctggcgaaccccgtcacggcggtctggagcctctgggcttctgcctacagaccttctcagtcactaccctggctgccccttccttagaagaaacgtgtcagcagttggcccgggagactctggaggagctggactggtgtctggagcagctggagaccatgcagacctatcgctctgtcagcgagatggcctcgcacaaggtgtgcaggtggtgggcagaacccctgggcggggcaggcgggggcggggccagtgggtagagccaaccgctggatgggaccagtgggcgcggcctgcggatggagccagccattaggttgttcctgtgggcggagatagctactgggtgtggctgattagggcagggccaatccctgggcgggggctggtggagctgggccctatggatggagccaaccactaggttaggcctgtagccgaggccaactattgggcgtggctcatgagggtggggccaatctctgggtagggtctatggtatggggtcagtccctgggtggggccaacccctgggcggcagcttcaaggcttgaagctcctgtagattatgactttccccagggctggaggagcctggtgtgtgttgtggggtggggtgtgtctgtctggttgtacatgtgtcaataggtgaccgtttccgttggggggttttatgcttttatggtctgcgggggtgtatctgcggctataggtctgcgtagccgctggtttattggctacgcatttgcagcgctggggtgttgggaatagattctgaagagtggcacgccagtgtgtacttgtgtaggtgtataggtttgcacgggtaattatgcagggttataggtgtgtggggctgtgccagaggggtgcgcatgtctgcaggggagagttggaccagatgggaaactgaatgtgtagctctatgtgtttgtgaatgtgtgtgtttgcagggccgtaggggtgactgcaatgctcccatgtacagttgtgcagacggtgcactgcacaactccaggggacaccattcaggaagcaggcagtatgtgtgaatgatgcttcctggagttggagagagtggtaacagcccttgtgggcgggtgcctatcaagaaatgatctgtaggtgggagtgtctttgttggggggtgcttacagcagtgggtggaggcttgtataggaacatagcagtctgagggcgattgtgtccctgagggtggatcaagcatctgaaatgtagctgtgtctttggatatgggtctgaggatgtttctgcaatggtgtgtgtgtgtgtgtgtgtgtgtgtgtgtgtgtgtgtgtgtatttttgcatctgtgagtatatttccttatggatttgtcgggatatgtttgtgtccaagggcagtggatatttgcaatggttggaaagtgtgtctgtgggtgtgtttagtgtgtgtctgtaagtgtggctggctggggaggccaaggcgggcggatcacctgaggtcgggagttcgagcagcctgaccagcatggagaaaccccgtctctactaaacatacaaaattagtcgggtgtgctggagggtgcctgtaatcccaactactctggaggctgaggcgggagaattgcttgaacctggaaggcggaggttgtggtgagccgagatcgtgccattgcactccagcctgggcgacaagagtgaaaactccgtctcaaaaaaaaaaaaagaaatgtggctggtatctcggtgtctgtctataggtgtgggtctggatgtgggtctggatgtgggtctgtgcccttggatggggcgtgtctgaaggcatttgctatatgctcagctgtggacctataagtgtgttggacatcagagttgtgactgtctccgggtgtgtgtgtgtgtgtgtgtgctgtaagtgtacaacagaaagcatttgagtatctgtgtatattcaagtgtcaagtgcctggatgtgtgtgggtgtccctggaaggtgtgtctcagggtgtttgtacatctgtgagtgtaaagtggatgtgtgtttctgtctctgggtgtgtccatggaggggatgggtcctgatggggacagcccacctaggttctggctgaggcccatgggctctgatgcccctttaatacccccccacccccagcaccacctgacatcccatgcagcctgccagtgctgcagtgagcacacacgcacacacacgggtgcacacacagagctccgcagcctcctcctgggacccttgccctgcccccctcccatgggcacggaccccccaccgcctccacccactgccgcgggggggcccgttggggcccagggctggcgggccatgtaaccagggctgctgctgggagcgcggaggggaagggagcccccagccctgctgggccggcccaggcccctccgcggctcccccttccactacccacctgcccggcaccccctccccagtggttgttaaccccgggactccccaagcccagcctctgtgtgcagcagccccaggcgggctaagtctccaagatgcccttggtggatttcttctgcgagacctgctctaagccttggctggtgggctggtgggaccaggtaggagagtgcagggtagggggtgggcgggcatcctggtgagctgggcccccggtgtgggcttgtgtgtgcagctgtgcacgtgtgtggcctggagatgaagccttgtgactgtctctgtgtgtggcccagggctgggcgtggatggcgggcagctgggggtgtgtgactctccctgggggtggactgcgggtccctcactgggtgtgactgtgtcagtgcctggatgtgtgtgtgtgtgtctgcgatggtgtgtgtctgcctgagtataggcttgtttgcctgggtcactgtgtggccctgtctgagatcatctggctctgaccatggtgttgtgtgttgggttgtgtgtctgagcccagagctgcctgatattttggggacatgtgaccccaaatgtcagtgaccgccttattttgcatgccctttgatctgtgtgtctgggctgtgtgacgctgtgtaggactgagagcctgtgattgtgtgtgtggttgtgtgagattttgtgggtccatcttgtgtggatgtgtgtgtctctgtacccagggtctctgggtggcaccgggaggagggagcaccccgtccaagcctgggccatgcaggctcacccctcctgccaagtgtccctcctgcttccctggacagagtctgctcctgcttttggggtgctgtggcagagcttgggggtggggagccaatgccctttctcctctgtgtacaatgtcacagcagaggcctgtgcagagtggcatggggggaccaggaggggcctccaagcccggttttgggtatactctgttcatctgtgcatctgtccacccttctggggttgggggagagtgggctatgatgagaacccccctccccctcccctgggtgatcaaactgggatttcctcagctcaccattctcccctaccccggccaaacctttttgtcccccagagcttggctaccacgttccctttttccaaactgagctggaggccaggagccaggacccccaggattggggtccatgtctgggaacacttgggtcaggggcagctctaggaaggcaagggttaaggggcctccggcttgccccccttttccccagctcagcagctggttggagggggagttgctaaggagactcccatcgccatggcgacgggattctcctgcttccctattggctccctgttaggcaggagcccctcccttccacaggtgcccctctagctcctccttgggggagatgaggagggaagcccctctttcctcaggcagggagggttatgctgaccatgactccccaaacctggggacctccatccagagctgggaggacaggaaaggctgaccccaaccccccagcagtcttataggggctctgttggctgagcagaaaaataggagggactcatggggtcttcaggcgttcttgggaaggactgacaccctcctcaccactgtgcttcccccatcatttcttccttgttgactcctttaccttagttcaaaaggatgttgaaccgtgagctcacacacctgtcagaaatgagcaggtccggaaaccaggtctcagagtacatttccacaacattcctgggtgagtgaggggaagcacgtgggattggaggggggacatttggggtagagagggggctgcccctgaccgtgggtcctgttgctcacatcttcccagggactctgactctcaactccccaaaggtcacagtcaccctatccaggaaccctcatgttcctgatgcctccaaactctgtgggacccccagcttctatagagcccaacatctgaaatcatctgtgagcttaaaacccttctaaactttaaaaagcctccaagcgccgggcgcggtggctcacgcctgtaatcccaacactttgggaggctgaggcaggcggatcacttgacatcagcagtttgagacctgcctggccaacatggtgaaaccccatctctactaaaaatacaaaaaattagccaggcatggtggtgggtgcctgtaatcccagcaactcaggaggctcaggcaggagaatcgcttgaacccagggggtggaggttgcagtgagccgagatcgctccattgcactccagcctaggcaacaagagtgaaactcttgtctcaaaaaaaaaaaaaaaaatattagccgggcatggtggtgtgtgcttgtaatctcagctacttgggaggctgaggcaagagaatctcttgaactcaggagacagaggttgcagtgagccaagatcacaccactgcgttccagcctgggcaatagagtgagactccgtctcaaaacaaacaaacaaacaaacacctctttgttttagcactcacttgaacccgggaggcagaggttgcagtgagctgagatcacgccactgctgcactccagcctgggcaacagagtgagactctgtctcaaaaaataaacaaaaaaaaaaagcctccaagctgaaaagcctcctgaactgagtagaaccccaaattcaatagaatttccaaacttggattgactcccttccaaactcagtagacacacccaaactcaagagagatgcccaaactcagtagagttctcaaacttaagggaagttctgtgcttccgagtccacaaaaggccccccaactttagcaacctccaaactgaaaaacccccaaattcaataggatctccaaacttggtatgacccccccccaattcagtagactcccaaaatgttagaaccctaatctctagaagattatcaagcttaagaacctgtaagaggcaggaagaggcagctcttgcctataatcccaggactttgggaggctgagaaaagaggatcgcttgagcccaggagttcaagaccagcctgggcaacatagtgagaatctgtctctacaaaaaaaattaaaaactaggccgggcgcagtggctcacgcctgtaatcccagcattttggaaggccgaggtgggcagatcatgaggtcaggagttcaagaccagcctgaccaacatggtgaaacgccatctctactaaaaatacaaaaattagctgcgcgtgttggcacacacctgtaatctcagctactcaggaggctgaggcaggagaattgcttcaacctgggagatggaggttgcagtgagctgagatagcgtcactgcactccagcctgggtgacagagtgagactccatctcaaaaaaaaaataaataaataaataaataaatagaataaaaaactagtcgggcatggtggcgtgtgcctgtggtcccagctacctgggaggctgaggcaggaggatcacttgagcccaggagttcgaggctgcagtgagacatgattgcgccactgcactccagcttgtctcaaaaaaactaacacctgtaagattcctaattcaatggaaccccaaatgcaccagaataccccgatttcactggaacccttaagttcatgggtacctcaaaaccctcaagctagagatattcccccaaactcaggataatttaatcctcgcagtttatcactacactccaaaggcccccaaattcgggaaccgcccagacaagctcaagaaaagtgttggggctgggtgcggtggctcacgcctgtaatcccagcactttgggaggccgaggcaggcggatcacttgaggtcaggagttcaagaccagcctggccaacatgatgaaactccatctctactaaaaatgtaaaaattagccgggcgcggtggcgggtgcctgtaatctcagctactcgggaggctgaggtaggaaaatcgcttgaacccgggaggtggaggctacagtgagccagagatcgtgccactgcactccagcctgggcgacagagcgagactctgtctcaagaaaaaaagtgttcggtgtttccagtactcccaccagtgagggtgtgtctctgagttctgaggatccacccaatgggagcataacatgtaaatgacccgtattaggccttttcattgactagctagctccaggtcacaatgggtgaccttggctcagctctggaagcccctgaaagctcaggaaaagggttcctggggctgtcccccaggcaggctggtgccaaggtgggcgggggggggggggggcagggacatggagccagagaccacccttccctctctcttcccagtgatgccaccccccacaccagcactcttggcccccatgctgggatcttccccacccagaaaggttccctgggtgttcggggtaggcagcggctctccctggcatccccacctcgctttctgacttcccacaccactctccatccatatctgatgatcagaccggggccatcccagagccctgggcccccactccagcccaccacctcctggaagatttcccacatcccctctggtttcctgactctgagtagccagcggcatcacagctgaaagggttctgccgtttcgggtgagccttccccgtacgtggtagtgggctgaagaataagggagcctccaggggtggaagggttgttcacacttgttcctgctccccatcttctgcagacaaacagaatgaagtggagatcccatcacccacgatgaaggaacgagaaaaacagcaagcgccgcgaccaagaccctcccagccgcccccgccccctgtaccacacttacagcccatgtcccaaatcacagggttgaaaaagttgatgcatagtaacagcctgaacaactctaacattccccgatttggggtgaagaccgatcaagaagagctcctggcccaagtgggtgggggctcagtaggggcagggctggagggggtggtctcctgggaccctgagaaggactgggcattgggttatgtcttaggccaggtttcccagaagcagagcttgagatgagggtttgagcccatcttgaggcaagcatgctggctctttgtacctctgtatcattcattgcttgggggccgtccccagggctggacgtatcacctcttgcatgtagctcctgttgggactagtcttctggaaatgcaggcagctgtgagccttagcaggcaacactcccagctgcagagggattggtgtacacagcagtgacgctaatccagactgtgcccccatagtgtccccaacagtccagaccggtgtttcactcctagctcttccaggggacagcggcagtggaagtgatccatctttggtggctcactcagctgaggcttattgtaaccctctttgagccacctcctccagtgaatcttccattcagtcacctggcctttagttatttatttttatttatttatttattttgagatggagactcgctctgttgcccaggttggagtgcagtagtgtgatctcggctcaaggcaacctccacctcctgggttcaagcaatactcctgcctcaccctcctgactagccgggactaaaggcctgtgccagcacacctggctaatttttgtatttttagtagaaatggggtttcaccatgttgaccaggctggtctcgaactcctggcctcaagtgatccacccgccttagcctcacaaagtgctgggattgcaggcgtgagccactgcacctggccaactggtgtttattaagcagctactatgtgctggcccttttctgaattttggagagacatggaaaataagcccttcttcctttctcccctggggctcgtgaacagcttagctaagaggctgagctgtgctggggccagtcgtgctgggttcctatcctagctttgccacttatgagctgcatgatcttggagaagtcacatcgcctctctgagccttggtgccttcacctgccaaacgagatcaagtgcttagagcaatacttggcagatcataagtactcaaaagacagtggctgtgattgctttcgctattttgcagcccagtaggacgagggcagtacattctgtgctgttgaacctgtcacccactgggtgagcaataatggtgcttccttcagaccaaggcttcaaactcctaggaaatgttctccagggccctgagccttacaggcttctgacctctggcctccgtctccaccaggaactggagaacctgaacaagtggggcctgaacatcttttgcgtgtcggattacgctggaggccgctcactcacctgcatcatgtacatgatattccaggtgatggggacagctgggagtgggcccgggtgaggggctcatagcggggcgctggaggccggtggaggtcaccaccctgcccctgcctgctctcaggagcgggacctgctgaagaaattccgcatccctgtggacacgatggtgacatacatgctgacgctggaggatcactaccacgctgacgtggcctaccataacagcctgcacgcagctgacgtgctgcagtccacccacgtactgctggccacgcctgcactagatgtgagtgactgccctgtgagtgaccgtccccatctctctttgtgactgcctcttcagcctcctgtgtgtctctctgaccctgtgtctctgacctccatctctctttgacgccatttctctctcttttttttttctttttgagacggagtcttgctctgccacccaggctagagtgcagtggcacgatctcagctcactgcaacctctgcctcccgggttcaagtgattctcctgcctcagcctcctgagtagctgggactacaggtgcccaccaccacgcctggctaagtttttataatatttttagtagagatggcgtttcgccaagttggacaggctggtctcaaactcccaacctcgtgatcagcccgccttggcctcccaaagtgctgggagtagaggcgtgagccactgtgcccggtcaaaaatcttatttcttaaaaaaaaaaaagttttagtccaggtgcggtggctcacacctgtaatcccagcactttggaaggccaagatgggtggatcacctgaggtcgggagtttgagaccagcctgaccaacgtggtgaaacactgtctttactaaaaatacaaaaattagccgggcgtggtggggcacgcctgtaatcccagctactccagaggctgaggcaggagaatcgctggaacccagtaggtggaggttgcagtgagccaggattgcgccactgcactccagcctgggcaacaaagtgagacttcatctcaaaaaaaataaaataaaaattgcggggggctaggcacggtggctcacacttgtaatcccagtactttgggaggctgaggcaggtgaatcacctgaggtcagaaatggccaacatggcgaaaccctgtctctaccaaaaatattttaaaaattagccgggcgtggtggtgggagcctgtaatcccagctactagagaggctgaaccaggagagttgcttgaacccaggatggggaagttgcagtgagccaagatcgtgccactgcattccaacctgggcaacaagagcagaactctgtctcaaaaaaaaaaaaaaaaaagaaagaaaattaaatttgagacagggccttgctatgttgcccaggatggcctcgaacttctggccttgaagtcctaggctcaagtgatcctcccatctcagcctcctaagtaggtgagacaaacaggtgctcaccaccatgcatggcttcaactctgttattctaacatccgtgtctctgctcccaggcagtgttcacggacctggagattctcgccgccctcttcgcggctgccatccacgatgtggatcaccctggggtctccaaccagttcctcatcaacaccagtgagtggccctcgccaggggcggggtttgctgagttggaggcggtgttggccaggctgggggcggaactaactaggctggaggaggggctggctggcctgggggcggggctggctggcctggaaaggggatggccgggcaggaggcggggctgggggcggggctggctgggctggaaaggggatggccgggcaggaggcggggctggctgggctggaaaggggatgaacgggcaggaggcggggctgggggcggggctggctgggctggaaaggggatggccgggctggggtagagctgactgggctggaggcgaggctggccgggctggggaggggttagctagttgggggcggagctggccctcctgcggttggagctgcacacgtgggccctcccctgacctccgggctgggctgcagattcggagctggcgctcatgtacaacgatgagtcggtgctcgagaatcaccacctggccgtgggcttcaagctgctgcaggaggacaactgcgacatcttccagaacctcagcaagcgccagcggcagagcctacgcaagatggtcatcgacatggtgggcggggctggggcgggacggagcgggaaaggaagcctaggagtcgagggctttggggaggagtgggtctgagtcccagaggaaccctcaacctggacagagcgggcggcttctacctggtgaaaacttcagaggcccgggtcagtctggggggcgggtgtcagcggccccagtgacgcccccttgcccgcaggtgctggccacggacatgtccaagcacatgaccctcctggctgacctgaagaccatggtggagaccaagaaagtgaccagctcaggggtcctcctgctagataactactccgaccgcatccaggtgcccccacgccccatcatctaaggagggaggacactcccccagccacacctttaggtctgggtagctaactgccccttcctcagcctctttctcccaagtggcccatcttcctgtgtccttctttctttttttttgtttgtttgtttttgagacggagtcttgctcttgttgcccaggctggaatgcaatggcgccatcttggctcaccacaacctccgcctcccgcctcccgcctcccgcctcccgggttcaagcgattctcctgtctcagcctgccgagtagctgggatcacaggcatgcgccaccatgcccagctaattttgtacttttagtagagagggtttctccatgtctgtcaggctggtctcgaactcccgacctcaggtgatccccccccgccccccgccttggcctcccaaagtgctgggattacaggcgtgagccaccgcgctcagccctctttttttaaatttatttttatttactttgtatgtttaaaggagagttggggtctcactatgtcacccagtctggtctcaaactcctgagctgaagttatcctcctgtcttggcctgccaaagtgctgggatagctggcgtgagccaccacacctgacctctttctgtctgtccccttctccatcttcactttccaatcccatctctccttcccatctctcccaccatttcctcccatttcccccaattcctcctttcttctcatcaactccttccaggtcccctgtccctctccctaaccatcttctcttccctcaccccccttccgactcctcccatattttctccatctcccacacacctctccccgttacctcctctgttctctgttctccccaccttctctccctactccctccctccccaggtgggagataagaaagcctgaaagctgggtgtggtggctcacgcctataatctcaactactccagaggctgaggcaggaggactgtttgaggccaggagtttgagaccagccagagcaacattgcaagatcctcttttcctttcctttcctgtcctgtcctgtcctgtcctttcctttccttcttctttctctttcttcttttctgtttttggttttttttttttgagatcgggtctctctgtcacccaggctagagggcacggatcttggttccctgcaaactccgcctcctgggctgcagcaattctcctgcctcagcctctagcgtagctgggattacaggtgcctaccaccagacctggctaatttttgtatttttagtagagatggggtttcgccatcttggccaggccgatctcaaattcatgacctcaagtgatctgcccaccttggcctcccaaagtgctgtgattacagatgtgagccaccgcgcccagccccattcttttttttttttttttttttttctgagatggagtctcactctgtcgcccaggctggagggcagtggcttgatctcggctcacggcaacctccgcctcctgggttcaagcaattctcctgcctcagccccactatagctgggattacaggcatgtgccaccgtgcctggctaatttttttgtatttttagtagagacagggtttcaccatgttggccaggctggtcttgaactcctgacctcatgatccacccgcctcagcatcccaaagtactggaattacaggcgtgagccacagtgcctggcccccatttcttaaaaaagaaggaatgcctgaggtctcagactgggacacaggcatagcctctgaagtttcccctgtgccccaaccccatgcaggtcctccggaacatggtgcactgtgccgacctcagcaaccccaccaagccgctggagctgtaccgccagtggacagaccgcatcatggccgagttcttccagcagggtgaccgagagcgcgagcgtggcatggaaatcagccccatgtgtgacaagcacactgcctccgtggagaagtctcaggtacaggctcggggcattgatggacgggcacagggtgagtctccccagcccatcttggcctgaagttctgaggcccaggagctcctcccctgcctttccacaatgccaagttgtcctgtttttggttttgttttgtttttgagacggagtctcattctattgcccaggctggagtacaatggcacgatcttggctcactgcaacctccgcctcccaggttcaagtgattctcctgcctcagcctcccaagtatctgggattacaggcgtgcaccaccatgcctggctaatttttgtatttttagtagagatggggtttcaccgtgttggccaggctggtcttgaactcctgaccttgtgatctacccgccttggcctcccaaaatgccaggattacaagtgtgagccactgcgcccagcctcctgtttttcttttatttaggttttatttatttattttgagaccgggtcttgcactgttgcccagggtagcatgcagtggtgtgatcatagctcactgcagccttgaattcctgggctcaagcgatcttcctgcctcagcctccagagtagctgagaatacaggtgcacaccaccacacctagctaattttttaaaattttttgtcgagacagggatttgctatgttgccagacttgtcttgaactcctgggctcaaaccttggcctcccaaagtgctgggatatggggtgagtcaccatacccggccttgttttcatttttctttttcttttttttctgagacagggtctcattgtgccacccaggctggagtgcaggggcgtgatcttggctcactgcaacctccacctcctgggctaaaatgatcctccacccccgcctccagagtggctgggactataggcgtgcaccaccacactcggctaatttttgtatttttcatggagatggggttctgtcatgttgcccaggctggtctcgaactcctgggctcactcagtctgcctccctcagcctcccaaagtgctgggattacaggggtgagccaccctgcctggcccctccccactttatatcctccctggtgaaacccaaccatctgagtttgatgtctctacccgtccagacctgagtttctaggcctcagcactgttgacatttgggtgatcattttttgtgctaggagctgccgtgggtattacaggattcttagcagaatccctggtctctctctacccactagatgccagaagtatccccctcctcattttttttttttttgagacagagtttccttcttgtcacccaggctggagtacagtggtgcagtctcagctcactgcaacctccgcctctcgggttcaagcgattctcctgcctcagcctcccgagaagctggaattacaggcatgcgccaccacgcccagctaattttgtatttttagtaaagatggtgtttctccatgttggtcaggctggtctcgaactcccgacctcaggtgatccgcccacctcggcctcccaaagtgctgggattacaggcataagccaccgcgcccagcctccccctgctcatttgtaaagaccaaaaatgcctccagacattgccaaatgtcccctaggtgtgcaaaatcactcacacacaccccatggaaaactaattttatacactttataacgtagttatgttcataggcaacttcatagcaatagtttgtggctttagcttttttttttttttttttttttttttttttttttgagatgaagtctcactctcgttccccaggctggagtgcaatggcgcgatcttggctcactgcaacctctgcctcccgggttcgagccattgtcctgcctcagcctcctgagtaggtgggattacatgtgcccaccaccatgccctgctaatttttgtatttttagtagagacagggtttcaccatgttggccaggctggtcttgaactccagacatcaggtgatccacccacctcagcctcccaaagtgctgggattacaggcgtgagccactgcatccggcctacttttttttttttttcctgagacggagtctcgctctgatgcctaggctggagtgcaatggcacaatctcggctcactgcaacttccacctcccaggttcaagcaattctccctgcctcagcctcccgagtagctggaattgcatttagctttttaaaaaataggccaggtgcagtggctcacgcctgtaatcccagcactttgggaggccgaggtgggctgatcacaagatcaggagatctagaccatcctggctaacacagtgaaaccccgtctctactaaaaatagaaaaattagccaggcacgatggcgggcgcctgtagtcccagctactcgggaggctgaggcaggagaatggcgtgagcccgggaggcagaggttgcagtgagccgagatcgagccactgcactccagcctgggtgacagagcaagactccgtctcaaaaaaaaaaaaaaaaaagtgtgtgtgtgtgtaaactgcatcaatgtatacatttttttgtttttgtttttgagacggagtcttgctctgtcacccaggctggagtgcagtggtgcgatcgcagctcattgcaatctccgcctcccaggttcaagcgattctgtctcagcctcccaagtagctgaactacaggcatgcaccaccacaaccagctaatttttgtatttttggtagagatgcggtttcaccatgctggccaggctggtctcgaactcctgacctcaaatgatccgactgcctcagcctcccaaagtgctgggattatagacatgagccaccatgcccggcccataagcatgtttttcatttcattagctcccataatgtggtggtatcatccaccccataggccgcccatttatactttcttcccctccaccaggtgggttttattgactacattgtgcacccattgtgggagacctgggcggaccttgtccacccagatgcccaggagatcttggacactttggaggacaaccgggactggtactacagcgccatccggcagagcccatctccgccacccgaggaggagtcaagggggccaggccacccacccctgcctgacaagttccagtttgagctgacgctggaggaggaagaggaggaagaaatatcaatggcccagataccgtgcacagcccaagaggcattgactgcgcagggattgtcaggagtcgaggaagctctggatgcaaccatagcctgggaggcatccccggcccaggagtcgttggaagttatggcacaggaagcatccctggaggccgagctggaggcagtgtatttgacacagcaggcacagtccacaggcagtgcacctgtggctccggatgagttctcgtcccgggaggaattcgtggttgctgtaagccacagcagcccctctgccctggctcttcaaagcccccttctccctgcttggaggaccctgtctgtttcagagcatgccccgggcctcccgggcctcccctccacggcggccgaggtggaggcccaacgagagcaccaggctgccaagagggcttgcagtgcctgcgcagggacatttggggaggacacatccgcactcccagctcctggtggcggggggtcaggtggagaccctacctgatccccagacctctgtccctgttcccctccactcctcccctcactcccctgctcccccgaccacctcctcctctgcctcaaagactcttgtcctcttgtccctcctgagaaaaaagaaaacgaaaagtggggtttttttctgttttctttttttcccctttccccctgcccccacccacggggcctttttttggaggtgggggctggggaatgaggggctgaggtcccggaagggattttatttttttgaattttaattgtaacatttttagaaaaagaacaaaaaaagaaaaaaaaaagaaagaaacacagcaactgtagatgctcctgttcctggttcccgctttccacttccaaatccctcccctcaccttcccccactgccccccaagttccaggctcagtcttccagccgcctggggagtctctacctgggcccaagcaggtgtggggcctccttctgggcttttcttctgaatttagaggatttctagaacgtggtcaggaatagccattctaggcggggctggggccagggtggggggcagtcactgtgggaggtcccagctccagcccccctctggtttgctgcctcctctcccctctaaaaaagtcttccgcttgattttgcacaatcccggcgatactcctggcgatactgactagaaagtcagggagctgggggagctgttcactttaggatacgggggtggtatggaagggagcgttcacaccgccagcctcgggcctgggatttgaggagggccctagacctcctccactctccatcccctttcccttccactttgggttcactttgaattttctccgttttttggggcagtggctctgatccactcacccccccgccccccgccccacttctagctgcttctcctcttgtttctgccttaataattcccacggccacaggcaagggggttgcagtggccgcctgcaccttggatgaggcagggccaggcgcccagaacccccatcctggccgcacccccctttccagggtcctccggaccccaccttccacactctgatcacagcccccctaccttttgccctaggaggaagcaataatggtgtataccctcattctcattcctgggcagcccttccttccaccctggcaccaaaataatttctcctccatccgtaccttgcctagcctctccctctcccccagctagtccctgagcaatacggcagacagatgcaagaccatttttctccaagccatgggggactgtttggaaggaaagccccctctctccctcctcccctcgccctcggcctggttctgcagctggaccgacctcattcatcgcctgccccctacccaattctgagcacacggtactgtagcccccagttcctccctagccttccatccctctgtccaccccagggggaggtaaccccgcactcacactcccttgatgctgtctgtacagggttcatattttgtagcgaaagtcgtttttgtcccagccggcgatcggagtgggccttttctttctttttgttcattctttacctttttttcttttctttctttcttttttgtacatactgtaaggttggtttgtaaattattctacggaggcaaaaagggaaaataaaaacttgcccttccctggctgacccagtcgggaaggtagggaaggaggtctcccgttgggagagtctctgttcctgctgtattatacaaactgtaccatagtcctgggaaaagggtggactcaccgctgttgttttatgggaagtcgtgtcatcctaggggttggggctgggcagagcctgtcccctccccccttctccaggagccagggggtgactggagagacagacccacccccaagcagggctcctctccccagggtgagcacaggacctctgtaagctgcttgtgtattgtccactttgacgatcagtcattcggtccgttgatcaataatccttcgatcttgtctccaattaaaccgaggctttcaccgattttcctggctgatgtggcttcattccccatgttgtttgttgaggtgtctccccgctgcaccgtctgcttgggttggggagggagtttctgtccctacttgttccccagcagacggaattgtgaagtagagcttggacagagacattccccagcctgagtcaggttataaaatggaaattcaagccatgcagggtttgttttgttttgttttgtttttgagatggagcttccctcttgttgcccaggatggagtgcaatggcgccatctcggctcactgcaacctccgcctcccgggttcaagcgattctcctggctcagcctcccgcgtagctgggattacaggcgcccgccaccatgtctggctaattctttgtatttgtcgtagagatggagtttcaccatgttggtcaggctggtctcaaactcctgactttgggagatccacccgcctcaacctcccaaagtgctgggattacaggcatgagccattgcacccagccccatgcagtatttaaaagggaaaagatgtggctgggcgcggtggctcacgcctgtaatcccagcaccttgggaggccgaggcgggcggatcatgaggtcaggagtttgagaccaacctggccaatatagtgaaaccccgtctctactgaaaaatagaaaaattagccgggcgtggtggtgtgtgcctgtagtcccagctacttgggaggctgaggcagaatagcttgaacccaggaggcggaggtttcagtgagctgagatcatgccactgcactccagcctgggtgacagaacgagactttgtctcgaaaagaaaaaaaaaaaggcaaaagactacccagtgcaaaggctcatgcctgtaatcccagtgttttgggaggccgagatcagcgcaggagttcaggacaagcctgggcaacatagtgagaccctgtctctattaaaaattttaaaaattggtcaggcacggtggctcatgcctgtaatcccggcactttgggaggctgaggcggctggatcacctgaggtcaggggttcgagaccagcctgaccaacatggtgaaaccctgtctctactaaaaatacaaaaattagctgggcatggtggcgcattcctgtaatcccagctactcaggaggctgatacaggagaattgcttgaacccgggaggcagaggttgcagtgagccgagattgtgccacttgtactccagcctgggtgacagagtgagactctgtctcaaaaaataaaaaaaaaattttaaaaagttagccagtggtggtggaccatccctgtggtcccaggtacttggaaggctgaggcaggaggattgcttgagcctgggaagtagaggttgcagtgagacgtgcccatgccactgcactccagcctggacaacaagagcaaaaactctctaccaaaaaaaaaaaaaaaaaattaatggcatggtctctctctgttttccaggctgaagtgctgtggcacaatcagctccctacagccttgaacttctgggttctagagatcctcctgcctcaccctacctagtagctgggattacaggtggatgccaccacacctggcctaacccacatacttgaatgctgttaattccactcacagagcctaattttcccacatttattaggctttttttttttttttttttttttggtggcagagtgagactctatcacccagtctatagtgcagtggtatgacatgatcatagttcactgcagcctcaacctcctggacttcagtgatcttcctgcctcagcctcccatgtaggcaggaccataggcgggtgccaccacgcccggctaatttattttttattttgtagagacagggtctcggtttgttgcccaggctggtctcaaactcctgggctcaagcaatcttcccaccttggcctcccaaagtgctgggattacaggcgtgagccaccacacccagccctgttaggctgattaacaagcccctggttttaccaataggtttctgacattcattatactaatgagcaaaacttctgaatatagataaagatatggatagtggaaatgtttgtgatttggaccttgattagaatactggctgcctcggctgggcgtggtggctcactcctgtaatcccagcactttgggaggccgaggcaggtggatcacctgaggtcaggagtttgagaccagcctgaccaacatggtgaaaccctgtctctactaaaaatacaaaaattacctgagcgtggtggcacgtgcctgtagtcccagctacctgggaagctgagacaggagaattgcttgaacctgggagctgcaggttgcagtgagcccagattataccactgcacttcagcctgggcgacagatcgagactccgtctcaaaaaaagaaggaaaaaaaaaaaagaatactggctgcctctggggcttaataaaccaggatgcacatgaatacatacagtgcttgagtaggtagacacaagggggcactagacatatatttttatacaatgcatgttctgaaacatgagagcatcttgcgtgggtccaaggaaaagtccacctgcctactctgccatttgtttctagtccagggactctgagatttttttctatttttcttttcttttcttttttttttagacgcggattggttctgtcacccaggctggagtgcagtggcatgatcagggctcactgtagcctagaccctctgggcccaagtgatactcccaccttagcctcctgagtagctggaatgataggtgtgcaccaccaagcccagctttttttttttttttttttttttggtagagatggggatctccttatgctgatcaggctggtcttgaactcctgggctcgagagggaatctgattggtgatcttgggggcgatctctctgagcttcacttgtttcttctactaaatggggatatattagctgagtgtagttgtgcgcacctgtagtcccagctactccggaggctgaggcaagaggatcacttgagcccaggaggtcgaggctacagtgaactgtgattgtgccagtgcactctagtctgggtgacagagtgagacactgcctcaaaaaaaaaaaaaaaaagtaaataaataaaatggggccaggtgtggtggctcacacctgtaatcccagcactttgggaggctgaggcaggcggatcacctgaggtcaggagttagagaccagcctggccaacttggtgaaaccttgtctgtactaaaaatacaaaaattagccaggcgtgctggcggggatctataatcccagctactggggagtctgaggcaggagaatcacttgaacctgggaggcagaggttgcagtgagccaagatcgcaacattgcactccagcctgggcaacaagagtgaaactccatctcaaaaaaaaagaattaattatttaaataaaatgggataatgacagttacagagttaaacagttgctctatagtacggtttggctagtaaaactttctttaaaaaaaaaaaggtgtagagatggggtctcaccatgttacatgcccaagctgatctcctcgaagtcctgggctcaagcaatcctcctgccccagcctcccaaagtgctaggattactagcactttgaccctaaaatcaggtgtgagccactgttcccggcctcagtaaaactttctgtggtaataggaatattctttatctgtgctatccaacaagtcagcaactagtcacatgtggctattgcgcccttgaaatgtggccagttttaatttccggccacagtggtggccagaagctactgtattggacttaaattctaaaaattcagccagagttaatggaaaatatttaggctatacaaagagttgtttgacaacagctgtaaagattcacagaagatagaacctagaaaagtgggaggagagaagcagagctcgaaaaataggtagaagttttcagggaatctgaactttgcaagaagtgaaaaggagacacagacattttccccagggactttcaaatggaggcagagtcgggaaaagggctttgggctgggggtcaggaggtgacagcactaattctagcctgcagtggactgtgggtgaccttagacgagatttctccttccaggcctcagtttccccaagtgtaaaagggtgggctgggtgcggtggctcacacctgtaatcccaacactttgggaggccgaggcaggcagatcacttgaggtcaggagttggagaccagcccaaccaacatggtgaaacccgcgtctcaactaaaaatacaaaaagattagccaaatgtggtggcacatgcctgtaccagctactcagaaggctgaggcaggagaattgcttgaacctgggaggtggagcttgcagtgagctgaggtcaagccactgcactccagcctgggcgaaagagcgagactccgtctaaaaaaaaaaaaaaaaaagaccaggtgtggtggctcacacctgtaatcccagcactgtgggaggccgaggcgggtggatcacctgaggtcaggagatcaagaccagcctgaccaatatggtgaaaccccgtctctactgaaaatacaaaaattagctggacgtggcggagggcacctgtaatcccagctactcgggaggctgaggcaggagaatcgcttgaacccgggaggtggaggttgcaatgagctgatatcatgcccctgtacttcagcctgggtgacagagtgagactttgtctcaagaaaataaaaaaatttttttaggccgggcgcggtggctcacacctgtaatcccagcactttgggaggccgaggcgggcggatcacaaggtcaggagatcgagaccatcctggctaacacggtgaaaccccatctctactaaaaatacaaaaaattagccaggcaaggtggcaggcgcctgtagtcccagctacgcgggaggctgaggcaggagagtggcgtgaaccccggggggtggagcctgcagtgagccgagatcatgccactgcactccagcctgggcgacagcaagactccgtctcaaaaaaaaaaaatttttttaaaaaaagggcagatgtgatgttcggaacacctcctgtattgggacagactgaaaatatgggtcaaaaatggcagtgatggccgggtgcggtggcccacgcctgtaatcccagcactttggaaggccgaggccggtggatcacctgaggtcaggagttcgagaccaacctggccaacatggagaaaccccgtctctctaaaaccccaaaacttatccaggcatggtggcacacacctgtagtcccagctactcaggaagctgaggcaggagaatcgcttgaacccgggaggcagaggttgcagtgagtggagattgtgccattgcactcaagcctgggcaacaagagtgaaactctgtctcaaaaaaaaaaaaaaaaaaaaaaatggcaatgacacatgaccatcagctggctctccagggtggggaattcaccttttttccagcaaaggtgaacaagggcagtggggcacagcagggaggccacgtaatctgaaggaggccaggggaacctggggaaggagtggagtcggttcattatctgaaattgacatcaaggcttgcaggcttcctggtactggtcttgagcaaatggctccgcctctcccagactttagagggctctatcctgtgctaaactttttaagattatctcattgactctccagctgttcttgagatatggactagcattggttccattttgcaattgaagaaactgagggctgggatgagatcgcacaatatggagaaaattcgaggaaataagacgaggacctcgcttcacccagtgcctgttcaacagtgatagctgtccccatacttttatgttatttcaggtgcacgaaatcttgagatgtaggtagtatttctccctctctaacagcataaaaacgtgtcagtgccggccaggtgtggtggctcacgcctgtaatcccagcactttggacgtggtggcgggcacctgtaatcccagctactcgggaggctgaggcaggatagtcccttgaacctggaaggtggaggttgcagtgagctgagatcatgccactgcactccagcctgggcaacaagagtgaaattccatctcaaacaacaacaaaaaaaagtcaatgcaaatcaaaataagacatttattttttattttcttttgcaaagcattttcacagctcatttctgttcgtgcaagctagaacatacagctttccaggaatggtctgacaatatttatcaaaaacataaccagctgggcgcagtggctcttgcctggaatctcagcacttttggaggctgaggtgggaggatcatttaagcctaggaattcaaaaccagcctgggtgacatagtgagacatgtctgtctgtctttctttctttctttctttctttctttctttctttctttctttctttctttctttttctttctttctttctttctctccttccttccttccttctttccttccttccttccttccttctttcttttctttctttcgagacaagatctcactctgttatccaggctccaggctgcagtggctaattgcagactcaacctccttaggctcaggtgatcctcccaactcagcctcccaagtagctggtattagaagcatctgccaccatgccaggctaaatttttttttttttttttttttgctcttttgtagagatggagtctcgccatgttgcccaggctgttctcaaactcctggactcaagcgatcctcctgcctcgcccccccaaagtgctgggattacaggtgtcaaccatcgcacctagacctgagacatgtttctaaaaaaaattttttttttgagacaatgtttcactcttgttgcccaggctggagtgcaatggtgtgatcttggctcactgcaacctcggcctcccgggttcaagcgattctcctgcctcagcctcccaagtagctgggactgcaggcacccaccaccacgcccggctaatttttttatttttagtagagatggggtttcaccatgttgtcctggctggtcttgaactcctgaccccaggtgatccgcccgccttggcctcctaaagtgctgggattacaggcgttagccacagtgcccggccaaaaatttttttttttttttagacggagtttcgctcttgtcgcccaggctggagtgcaatggcacgatctcagctcaccgcaacctctgccttccgggttcaagcaattcccctgcctcagcctcccaggtagctgggactacagggatgcgccatgacgcccgactaatttttgtatttttagtagaaacagggtttcaccatcttggccaggctggtctcgagctgctgacctcatgatccacccgcctcgacctcccaaagtgctggaattacaggcatgagccaccgtgcctggccaaaaaatatttttttaaagatgcaactgcttggccaggcacggtggctcatgcgtgtaatcccagtactttgggaggccaaggtgggaggatcacctgaggtcaggagttcaagaccagcctggccaacatggtgaaaccaacctcatctccacaaaaataacaaaattagccaggcatgatggtgggtgcctgtaatcccagctactccagaggctgaggtgggagaatcgcttgaacccatgaggtggagggtgcagtgagccgagatcgtgccgttgccctccagcctgggtgacagagtgagactgtctaaaaaaaaaaaaaaaaaaaagatgcaaagatgcaaatgctcaaatatctaaagtaaaaaatgtctctattctccttggtcagaatagtgaagaattattaataatccaggtgaccactattaaggagttattaaattacttttcacctatatgatggaataatatgcaaccattaaaaatgatcaagtgggctgggcgcagtgacttacgcctgtaatcctagcacttttggagaccgaggctcgtggattgcctgagctcaggagttcgagaccagcctgggcaacacagtgaaaccctgtctctactaaaatacaaaaaattagacgggcgtggcagtatgcgcctatagtcccagctacccgggaggctgaagcaggagaactgcttgaacccaggaggccgaggttgcagtgagccgagattgtgccactgcactccagcctgggcaacagagcaagactccgtctccaaaaaaaaaaaaaaaaaaaaaaaatcaggtggatctatgtttattgaaatggccagagatattcacagtcagaacagcaggtttcaaaatattctgtattatatgatcctactgaaaagtaacatgcagagaaaaggcagttacccatccagatattcacagtgtctccagtggtgggattaagaaagatctgtgtcttcaaacactgcggaaggccgcagggtcctctgcctaggaaaaccagagacctttgttcatatgtttatctgctaaccttctctccactattgtcctatgaccctgccaaatccccctctccgagaaacacccaagaatgatcaataaatactaaaataattttttaaaaaagaaagatctgtgtcttgtgtagtctttgacattttctgaacattttgcaatgagcatatattacattcattgatgatcgattgattgggacagggtctcatttgtcacccagactggagtgtagtggtgcaatcacagctgactgcagtctcgacctctcaggctcaagcaatcctcctgcctcagcctcccaaatagctgacaggcacctgcccctgcccccagctacttaaaaaaactttttgtaaagatgggttctcactatgtcgcccaagctggtctcaaactcctgggctcaagcgatcctcctgcctcagtgttgggattacaggcgtgagtcactgcacccagtctatattacttttataatcagaaagttattttataatcaggggaaatgaaaaacatctggtatttattatctgggaggcacaaaaacgtggtggataagcacacagattctagattcagctttcctggattttggctccaactcagccaagttaatggctgggttagtctgggcaggttactggccaaggggggaaaccatgcctcagtttcccccattgtaaaatccaaataacaatagcttaggtttaccgagaggttgttatgtgacaagcactgtttgttttacgtaaatcatcgaggtaaatgctcacaacagccctattaagtaagtactattattataaaaagggtcacaggcataggcagggaaggaggtagggctgggagtcggagcccgtgagcgccccctagagtagggctaaggggcgggggggcgggctacagcagaatagggacccagcgcactcgcagaacgaggggggaggcgaggcgagaacgagcgggagtttttttcccgactacgattggctggtgtaattgtcatcacttgaaaaggcagccaatgagaggcgcggtcgcctcgctggtggaagccgagagctgagcgaagtgaggcgtgcggagccaaaggcgctagagcgatagcgggagccccggaccccgaagcggttgaggggatccaggcctcacaacgtcttgagagtggccccagcgtcgttcctagtctcttcggcagaccccagcgtcgtccttcttttcctgagaatatcctgacaccagtcgcccgttccagaaggggacacttggcgtcatccctttttttctgagtgaccccagagtcgtcctcacttcctgagggggatcctggcgtcatccgcccttcttgaggggaccctgctgtcactaccctgtcctgatggccagcaccgcattgtcctttcttcccgcgggaaacccggacatcatcccctctttctggcggggacccccatgccattatcccctcctgaggagaccccagagccagagccgtccccccttcctcaaggctccccagcgttgtttcttcttcccgagaaggggcctggtgctgttccccgtttccagagtgtttcctatcgttgtcctccccacactcagaaggcatctgtcatcccccctttttctgagatcagtcccttcctcctttccagtttaaggccgacccctgcaaacgcttctgtggcacccatagatagaaggcccaaagacccccctgtgctcccttgcccccaattgagcagacgggaaggcaaaagactcagctcaccccatgaagatgggaagaaaccgaaactagctgatgaaggaactcactatgccacatgagaaatcatttagggccgggcgcagtggctcacgcccataatcccagaactttgggaggccgaggttatcatataagatcaggagttcgagaccagcctggccaacatggtgaaaacccgcctctactaaaaaatacaaaaattagccgggagtggcggtatgggcctgtaatcccagatactcaggaggctgaggtaggagaatcgcttgaacccagcaggtggaggttgcagtgagccgagatcacaccactgcattccagcctgggcaacagagtgagactccatctcaaaaagaataaataaataaaaagaatttgccagtcaacaacaatttttttttcttgcctcccgggttcacgccattctcctgcctcagcctcccgagtagctgggactatgggtgcctgccaccacgcccggctaattttttgtatttttagtagagacggggtttcaccgtgttagccaggatggtctcgatctcctgacctcgtgatccgcccacctcggcctaccaaagtgctgggattacaggtgtgagccaccgcgcccggtcaaatacaaaattttaaaacaacttttatatatactcagttaaggcagacaaaacaagtctctgattatttcattcactgaggcaatattaatttttgagacacttccacacagatttacattttaaaaaaaatgtcaggtgcggtggctcactcacacctgtaatcccagcactttgggaggctgaggcgggcggatcacgaggtcaggagatcgagaccatcccggctaaaatggtgaaaccccgtctctactaaaaatacaaaaaattagccgggcgtagtggcgggcgcctgtagtcccagctacttgggaggctgaggcaggagaatggcgtgaacccgggaggcggagcttgcagtgagccgagatcgcgccactgcactccagcctgggcgacagagcgagactccgtctcaaaaaaaaaaaaaaaaaaaaaaaaggaaacttaagggccaggcacggtggttcacgcctgtaatcccagcactttgggaggccgaggtgggcagatcacctgaggtcagaagttcgagaccaacctgaccaacatggagaaaccccgtcactactaaaaatacaaaattagccaggcgtggtggtgcatgcctgtaatcccagctactcgggaggctgaggcaggagaattgcttgaaccggggaggcagaggttgcagtgagccaagatcacaccattgcactccagcctgggtaacaagagcgaaactctgtctcaaaaaaaaaaaaaaaaaaaaaaaaaaaaaaaagaggctggggggtggctcatgcctgtaatcccagcactttgggaggccaaggagggcagatcaggaggtcaggagatcgaaaccatcctggccaacatggtgaaaccccgtctctactaaaaaaaaaatacaaaaaattagctgagcgaggtggctgatgcctgtagtcccagctactcgggaggctgaagcagaatggcgtgaacctgggaggcggagcttgcagtgagctgagatcgcgccactgcactccagcctgggcgacagagcgagactccgtctcaaaaaaaagaaagggaaacttaaaatattcataaagattaatcgagtgaaaggccaggtgccgtggctcacgcctgtaatcccagcactttgggaggccgaggagggcggatcatgaggtcaggagatcgagaccatcctggctaacacggtgaaaccccgtctctactaaaaatacaaaaaattagccgggcgcggtggcgggcacctgtagtcccagctactcgggaggctgaggcaggagactggcatgaacctgggaggcggagcttgcagtgagccgagatagcggcactgcaatccggcctgggagaaagagcgagactccatctcaaaaaaaataaaaaataaaataactgagtgaagggggacaggtgctttggcttatgcctataatcccagccctttgggaggctgaggcaggagaaactcttgaggtcaggagttcaagaccagcctgggcaacatagcctgcttggtggcgtacacctgtggtcccagctacttgaaagactgaggtgggaggatcacttaaaactgggaggtcatgcctgtagtagtgagccttgatctggccatagccctccagcctggacaacagagtcactctgtctcgaaaaaataaataaaaataaaaaaataaactgagagacggccaggtaggatgacatgtgaggagtagacggatgtagggtagaaataaaagagaccccatgtaggatagttgagacttgagggaaaaataaaccaacttcttgggtaatgtaattattagtctttcaggcccctgaagctgagcgtaaatgaaggctgaggcaactgaagttggcactaggagattcggtttccttttcttaccacccttatcaagataattgcttaatcccggaggatcctgggacatgtagtctaaaaagagtgttcctgctttaaaaggtggcaccggccgggcgcggtggctcacgcctgtaatcccagcgctttgagaggccgaggcgggcggatcacgaggtcaggagatcaagaccatcttggctaacacggtgaaaccccaactctactaaaaatacaaaaaattagcccggcgtagtggcaggcgcctgtagtcccagctactcgggaggctgaggcaggagaatggcgtgaacccgggaggcggagtttgcagtgagccgagattgcgccactgcaccccaaactgggtgacagagccagactccgtctcaaaaaaaataaaataaataaaataaatataaataaataaaaggtggcaccacaggccgggcgcggtggctcacgcctgtaatctcagcactttgggaggctgaggcgggcagatcacgaggtcaggagttcaagaccaccctgaccaatatggtgaaatcttgccactacttaaatatacaaaaattagcgggacatggtggcacatgcctgtagtcccagctacttggaaggctgaggcaggagaatcgctcgaacccaggaggcagaggttgcagtgagccaagatcacaccactgcgctccagcctgggcaacaaagcgagactctgtctcaaaaaaaaaaaaaaaaaagtttgcgccataaaattagttacaaccctgagcagtggatagggtgctggtgcttgcaggagggcgagtcctttaaatagggaactccctcaaagcatgtgcacttttatttgatttataagaaatatcatttggtccaaagttttgaagaatgaaacagatgtttgctcttgttgcccatgctggagtgcagtggttaagatctcggcttaccacaacctccacctcccgggttcaagcggttctccttcctcagcctcccgagtagctaggattacaggcatgtgccaccacgcccggctaattttgtatttttagtagagacagggtttctccatgttagtcaggctagtctagaactcccgagcttaggtgatctacccatctgggcctcccaaattgctgcgattacaggcgtgagccaccccacctggcccggagaatgctacttttaaaaataggaacaagccaggagctcatccaatcttgttccttttctaactttctttctctggaaatagttccttttctaactttctttctctgggcctctttcacccagaggcccacaagagggtgctgtctgccttttagatggaacttcctgactctgccctgagggtattcatcccagagctatacctcccgggttcaagcgattctcctgcctcagcctcccgagtagctgggattacaggcacatgccaccacgggcagctaatttttgtatttttagtagagacagtgtttcaccatgttggccaggctggtcttgaactcctgacctcaggtgatccgcctgcctcagcctcccaaagtgctgggattacaggcgtgagccaccacacccagccttattttattttagagtcaggggtattgctgtgtcacccaggctagagtgcagtggtgcagtcatagctcagtgcagcctcaaactcctgggctcaagtcacctcccgcctcagcctcccaaagagttgtgattactggcatgagccattgtacctggacagcctgtgaattttacttatttattatttttatttttgagacagagtcttactctgctgcccaggctggagtgcagcggcgcgatcttggctcaccacaacctctgcctctcgagttcaagtgattctcgtgcctcagcctcctgagtagctgggattacaggcgtgcaccagcacccccagataatttttgtattttttagtagagacagggtcacactacgctgtccaggctggcctcccaactcctgagcttaaacaatccacctaccttggcctcccaaactgttgggattataggcaggagccaccacacctggcccagcctatgaattttatctatttatttatttattattattattttttgagacggtgtctcgctcagtagcccaggctggggtgcagtggcgcgatcttggctcactgcaagctctgcctcctgggtttacgccattttcctgcctcagtctcccaagtagctgggactacaggcgccagccactgcgcccggctaatttttttttttttttgtatttttagtagagacggggtttcaccgtgttagccaggatggtctcgatctcctgaccttgtgatccgcccgtctcggcctcccaaagagctgggattacaggcgtgagccactgcgcccagccatgaattttaaattatacaactaaagtggtctgctgtgaaatgttatcatgatcattctaacgtcaacagtcttgacaattctgcccaatttcagcatttcaggtttccagtacttaactcattcctaagtaaataatactacattacaaggcaaggtgacacacacctgtaatcccagcactttgggaggccgagtcaggggatcccttgagcccaggagttcaagaccagcctgggcaataaggcaaaacctcatttctataaaaaatacaaaaattagctgggcatagtggcacatgtctgtagtcccagttactgaggaggctgaggtgggaggatcacttgagcccaggaattcaacgctgaagtgagctactatccctccacttcagccggggcaacagagcaagaccttgtctctgggaaaaaaaaagaaaaacttgaaagagaagaactattgaggaaggaaaagggtgatacctttggttgtgtctaaatttaccaggctgcacgtggtggctcatgcctataatcccagcactgtgggaggccaaggtgggtggatcacttgaggtcaggagttcgagaccagcctggccaatatggtgaaacactgtttctactaaaaatacaaaaattagctgggtgtggtggtgcgcagctgtaatcctagagactcgagaggctgaggcaggagaatcgcttgaaccctggaggaggaggttgcaaaactccgtcttgaaaaaaaaaagtaggccgggcatggtggctcacgcctgtaatcccagcactttgggaggccgaggtgggcggatcacctgaggtcaggagttgagatcagcctcaccaacatggagaaatcctactgaaatacaaaactagccaggcgtggtggcacatgcctgtaatcccagctactcgggaggctgaggcaggagaatcacttgaacctaggaggcagaggtcgcagtgagctgagatcccgccatcgcacttcagcctgggccacaagggcaaaactccatctcaaaaaaaaaaaaaaatgaccttggggagccctaggagatgtgactaggaattagctgcttgtcttccaaggcagctgaaactgaaggacaactgtgtggcttgcctacggggagaaagatgccctacatataaaaatgcgatgggcaaagattacaaactggtttcaaataccagccctaagtcaaagaggagtgtgtttcagaagaagagccctttctggcccccggtttcaggcctccagcccagagccagggtgaaagacactagttagtctgttctttattttccttggaaaattacagggttacttatcaacaaaataactgtccatccggtggggaagtgccatccggtggcttctatgtacaggcccatccctgggaaccacatttccagagggggcctccccctgaggcccccattggccccctcccaggtatccaagaataaatcacatggtgacagctgccggcatgggtgagtgggacccaggcctattacccggccagagggtttgggggcctctctcctggaagcctgctctttccacaccccctttcccagccaggctgtcttggacactcccggggctccgctgaggggcacatgattcccgctttggacttcttttgagatgtcattttaacactgaggcatcctggcctcccttcccggaagatgggttatttgcagtgctgtcttttcttttagtcccggtttttgtacaaaaacaatgatactccccattggactgtatttttgcccaagaaacaaaagtgcctcaacaggtacagttctgctggtcaatctgcttccggcagggctccatggtgacagccacgcccaccccactccggcccgatgtcattcgggtcacctcgctccaggtgtctgtatctgggtcgtaacactccacactgtccaggaacgtgtgaccatcatagcctcctgcgggaagaacagaagggatggtcaccacctgtcacaccacatccaagagcaggggacagaaagagagagatgcagctgtgagatgcaaaagcaggccgggcgtggtggctcacgcctataatcctagcactttgcagggctgaggcaggaggattgcttgaggccaggagttcgaagccagcctgggcaacatagcaaaaccttagtctcttactaaaaaaaaaaaaaaaaaaaaaaaatggccaggcttggtagctcacgcctataatcccagcactttgggagactgaggtgggtggatcacttgagtccaggagtttgagaccagcctgggcaacatggtgaagccccatctctacaaaaaaacataaaaatttagccaggcttggtggtgcgcgcctgtagtcctagctattagggaggctgaggtggggaggatcagttgagtctgggaggcagaggttgcagtgagcagaggctgcaccactgtactctagcctaggcaacagagtgagaccctatctcaaaataaataaataaaaataggaaaataggccactcgcggtggctcatgcctgcaatcccagcactttgggaggccgaggcgggcagatcacctgagatcaggagttcgaggccagcctcgccaacagagtgaaaccctgtatctactaaaaatacaaaattagatgcgattggtgatgcacgcctgtaatctcagctacctgggagactgaggtaggagaatcgcttgaacccgggaggcggaggttgcagtgagctgagattgtgccactgcactccagcctggtgacagagcaagactccacctcaaaataaataaataaataaataaacaaaaaataaaaaaataaaaataaaataaaataaaggccgggcacagtggctcatgcctgtaatcccaggactttcggaggctgaggcaggtggatcacctgaggtcaggagttcaagaccagcctggctaacattgtgaaaccccgtctctactaaaaatcaaaattggccgggcatggtggctcacacctgtaatcccatccctctgggaggccgaggcgggcagatcacctgaggtcaggagttcgagaccagcctgaccaacatggagaaaacccttctctactaaaaatacaaaattagccgggcgtggtggcgcatgcctgtaacctcagctactcgggaggctgagggaggaaaatcgcttgaacctgccaggtggaggttgcagtgagccgagatcgagccattgcactccagcatgggcaacgaaagtgaaactccatctcaaaaaaaaattagctaggcgtggtggcacgtgcctgtattcccagctactcaggaggctgagacaggagaatcacttgaacctgggaagcagaggttgcagtgagccaagattgcgccattgcactccagcctgggcaacatgagcaaaactctgtctcaaaaaaataaaataaaataaaataaaaataaacaaaaacattaagctgggcgcggtggctcacacctgtaatcccagcactttgggaggctgaggtgggcagatcacctgaggtcaggcgttcaagaccagcctgaccaacatggtgaaaccccatctctactaaaatacaaaaattagctgggcatagtggcaggcgcctgtaatctcagctacttgggaggctgatgggggagaatcacttgaaaccaggaggcggaggttgcagtgagctgagatcgtgccattgcactccagcctggcaacagactgagactctgtctcaaaaaacaaaacaaaacaaaacaaaacaaaaaacaaaacaggccgggcgcggtggctcatgcctctaatcctagcactttgggaggccgaggcaggtggatcacgaggtcaggagttcgagaccatcctggccaacatggtgaaaccctgtctctactaaaatacaaaaaattagcctggtgtggtggcatgtgcctgtagtcgcagctactcaggaggctgagacaggagaatcgcttgaacccaggaggtggaggttgcagtgagctgagatcatgccattgcactccagcctgggcaacactgtgagacaccatctcaaaagaaaaaaaacattagccgggtgtggtggtgcgcgcctgtggtccctgctacttgggaggctgaggcaggaggatggctggagcccaggctgttgaggctccagcgagctgtgatcacaccactgcactccagctgggcaacagagcgagaccttgtttctaaaaaaaaaaaaaaaaaaaaaaaaaaggaaagcaaaagcaaaagcagtccacaaaagatgggctagtcaggactcttccccgcccccagggcctcaccaaggacgtagattctcccctggtggacagtgatccccagggcacttcgccggtgcttcatgggggctacgaaagtccacgtctctgtttccacatcgtagcgctccacgctgttcagctggtcctgaccatcatagcccccagcagcatagatacagttgtgcaggacgcagacgcctaaagggcaccatgcagagaaggtgactctgggggtctggctttgggaaccccagccatcacctccttgagggagacctttcctctctcctctcccttctcaccctcagaaatgaagcggggagagagagaagcttggactctatcagaatccagggcttctgtggttaccccagcatgagggttgcaacagggggtctctcccaggcctggctcagtttcaccccaggatggtagggggtgttcctgggtgctcccctccctaccgtccccacccacctgccccgcttcggatggtgttcattgctgtgatcattcgccactcgttcctctctgggtagtaacactcagctgaattaaggcggtttgtcccgtcaaagccccccacggcataaaggagacgattgaggacagccacgcccaccccgatccttcgtgtcagcattggggccaccaagtgccactcatcccgctctggctcatacctgcaagggcgtaagaaaaatggggacaatggccattatagctgaccttcgtggaatacttaagggccagatactcttttttttccttttttttttcccccttaaagagacaggttcatccggcgcgatggctcatgcctgtaatcccagcactttgggaggccgaggagggcggatcacctgagctcaggagtttgagaccagcctggccaacatggtaaaaacctgtctctactaaaagtacaaaaattagctgggtgtgatggcagatgcctgtaatcccagctactcgggaggctgaggcgagataatcacttgaacctgggaggcggaggttgcagcgagctgagatcatgccactgcactccaacctgggcaacagagcgagactccatctcaaaaaaaaaaaaagaaaaaaagagacagggtcttgctccgttgtccaggctggagtgcagtggtgcaatcactgaagcttcaaactttttttttttttttttttttgagatggagtgcaatggtgagagcatggctcactgcaacctccacctcctgggttcaagcagttattcagcctcagcctcacaagtagctgggataacaggcacccaccaccacgcccggctaatttttgtatttttagtagaaattgggtttcgccatgttggccaggctggtctcaaacacctgacctcaagtgatctgcctgcctcagctttccaaagggctgggattataggcatgagccaccacacccagcctgcagctatcaactcttgggctcaaggaaccctcctggctcagcctcctgagtagctgggactacaggtgcacaccaccgtgcccacctccactcgaactctagtgcttgcagttgttctccaaggattgaggtatcagcaactccattttccaaatgacaaaactgagcctcctagccatcaattgctcaagttcaaaaacacatctgataaacccctagtggctcagccagatcccccacttcacagataacaagataacatctcagaaaggagaaatcacacattcagcatcactctttgatgctcaaagagtcctttaggtccggcacagtggctcacacctgtaatcgcagcactttgggaggttgaggtgggagaatcccttgaggacaggagttcaagaccagcctggccaacatggtgaaaccccatctctacaaaaaatacaaaaattaaccaggcgtggtggtgggtacttgtagtcccagctaccccagggtctgaggcaggagaatcacttgaacctgggaggcgaggttgcagtgacccaagatgcactccagcctgggcaacagagcaagagagacagggtcttactctattgcccaggctagtctcctggactcaagcaatcctcccacctcagcctcccaaagtccctgattataggtatgggccacagtgcctagcccaacaatttcaaactgatggaacattttccaactccgcacaaaggaaccatatgggtttgtgacagtcccctaagcatttcccagccccaggcacagaatcaaaggtcactgactagaactctccaaggagcttagcttcatcctgaggcctccactccctgaagacaggaagaggaaacagcctcaggaagaatacccggatctcagtgtcttgggacttgccaggagcaggaccctccgagcccacccccaggccctgccactcacctctccacactgttgtggtggatgcagccgtgggagccgccgacggcatagatgtggccatcgatgacccccaccccgatgcggttacggggcacgctcatgggggcgcagggcgaccactgattggtcatggggttgtaacagtccagggcgctggagtcggtgttgccgtcgggcgagttgttcctgccgcccacggcgtacaacagcccgcccaccacgcagccggccaggccgctccgcggcacctgcaggtccgccaaccggagccaggtgccgtcactggggttgtaagcctccaggtagctgagcgactgtcggaagtagccgcccgcggtgtagatcaggcggcccaccttgggcgcccggcagggcatcacctgcgtgggcttgtgcagggtgagctcctcgaagatcttgaccaggtagtccttgcagcgggagtcggactgcaggatctcgcacttctgcagctgcatctgcaggaagttcggcgtcaacgagtggcagcgcacggcccgcagcagcgcctggacgtagaaccgtcgctgttcgcagtcgtacttgacccagttgatgcaggcgtggaagacctcggactcgcagcgcacgttcaggtcgtcccggctgatgagggtcaccagttggcagtgggacaggttgaagaactcctcttgcttggccacctgcagagggcgacagtgggacgggctgactctccagtcacccccacacctcaccaagcaggaccgggacaagtaacttatcactgccgctgacagtctcagcttccttatctgctaaatggggattcaaataataggaaccgcgtacattgtgatgactaaatgagttaatcctgccgggcgcggtggctcacgcctgtaatgccagcactttgggaggccgaggctggcggatcacgaggtcaggagttgagagacaagcctggccaatatggtgaaaccccatctctactaaaaatacaaaaattacccgggtgtggtggcacacgcctctagtcccagctactcgggaggctgaagcagaagaatcgcttgaacccgggaggcgggaggcggaggttgcagtgagccgatattgcgccactgcactccagcctgggcgacagagcaagactctgtctcaaagaaaaaaaaaaaagagttaatactatgtgccaagtatgtcatcaggactcaggaaaatgggcaaagactcagtagatcgtgtaccctggggtatcatttggctttggtttttgagacagagtctcactctgtcacccaggctggagtgcagtggcatgatctaggctcactgcaacctctgcctcccaggttcaagcaattctcctgcctcagcctctcaagtagctgacattacaggcacctaccaccatgccccgttaatttttattttattttattttattttgatatggattcttactctgttgcccaagctggagtgcagtggtgtgatcttgcttcactgcaacctccgccacccaggttcaagtgattctcctgcctcagcctcccaagtagctaggattacaggagtgtgcctccagagcagctaattttttttttttttttggagacagtcttgctctgtcgcccaggctggagtgcagtggagcgatctccgcttgctgcaacctccgcctcctgggttcacgccattctcctgcctcagcctcccgattagctgggactacaggcgcccgcgaccacgcccagctaagtttttttgtatttttttagtagagatggggtttcaccgtgttagccaggatggtctcgatctcctgaccttgtgatccacccgccttagcctcccaaagtgctgggattacaggcgtgagccaccgcgcccggccatttttttgtatttatttttagtagagacggagtttcactatgtatttttagtagagatggcatttcttcatgttggccaggctggtctcaaactcttttttttttttttttttttttgagatggagtctcgctcttttgcccaggccggactgcagtggcgctatctcggctcactgcaagctccacctcccgggttcacgccattctcctgcctcagcctcccgagtagctgggactacaggggcccaccaccgtgcctggctaatattttttgtatttttagtagagacggggtgactgtgttagccaggatgatcttgatctcctgacctcgtgatccgcccgcctcggcctcccaaagtgctgggattacaagcgtgagccacctcgcctggccagtcttgaactcttgaccttaggtgatctgcccatctcagcctccctaagtgctaggattacaggcgtgagccaccggacctggcctgtttttgcttttgagacacagttttgctctgtcacctaggctgtagtgcagtggcacaatcatagctcactgtagccttgaactcctgggctcaaacgatcttcccacctcagcctcctgagtcgctgggactacaggtgtgtgccaccacgcacagctaattttcatatttttatggtagagacggggtttcaccatgttggccaggttggtctggaactcctgacctcaagtggcccacccccttgccttccaaagtgctgggattacaggcatgagccaccgtgtccggccgttggtcttaaactcttgagctcaaatgattctcctacttcagcctcctgaggattacaggtgtgcatcaccatacctggcttggctttttttttttttttttttttgagatggagtctcgctctgtcgcccaggctggagtgcaggggtgcaatctcggctcactgcaagctccacctcccgggttcacgccattctcctgcctcagcctcccgagtagctgggactacaggcgcccaccaccacacccggctaatttttgtttttgtatttttagtagagacgggatttcaccgtgttaaccaggctggtcttgaactcctgacctcaggtgatctgcctgcctcggcctcccaaagtgctgggattacaggcctgagccaccgcgcctggcctctgagttttctgtttgtttcttttttttttttttttgagatggagtctcgctctgtcgcccaggctggagtgcagtggcacgatcttgcctcactgcaagctctgccatccaggttcatgcgattctcctgcctcagcctccgagtagctgggactacaggtgcccaccaccatatccagctaattttttgtatttttagtagagacggggtttcaccatgttagctaggatggtctcgatctcctgacctcgtgatccgcctgcctcagcctcccaaagtgctgggattacaggcgtgagccaacgcgcccggcctcttttgtttcttttttttttttgagacagagtctcactctgtcgtcaggctggatacagtggcgtgatctcggctcactgcaacctctgtctccgggttcaaatgattcttctgcctcagcctcagcctcctgagtagctgggactacaggcacgcacaaccacacccggctaatttttgtatttttagtagagatgggatgtctgagtttattttttaagagacagggtcttgctctgtcacctatggtggagtgcagaggtgccactgtaacctcaaattcctgggctcatgtgattctcctgcctcagcctcccaaagcactgagattatacgcacgagccaactcacccatcttgttttttaaaatgaaatcattttctaaaatggcaaatagactaaaaaaggaaaaaataagcaatcacaatagaatgttgtggaaaaaaacaagtgacagctctgggccagcacagtggttcccacctgtaatcccagcactttgggaggccaaagcaggcggatcacctgaggtcagaagtccgagaccagcctggccaacacggtgaaaccccgtctctactaaaaacaaaaaaattagccagctgtggtggtgggcacctgtaatcccagttactgaggaggctgaggcaggaaaatcgcttgaatccaggaggcagagattgcagtgagctgagattgtgccactgtactccagcctgagcaacagagtgagactccatctccaaaaaaaaaaaaagtggaagctccgaagaaaccagcatgagttggaattttgatccgaccacttcgtaggtgtgtaacttgggcaaatctctgaaatgctccatgtcttggttttcctcctctgtaaaatgggattatattaatggccacctcaaagtaaggctacttctagggtatacagagccctggataaatatttcttgtagccaggtgtggtggctcacgcctgtaatcctggtactttgggagaccaaggcgggaagattgcttgagcccaggagtttaagaccagcctgggcaacatagcgagacctcatctctaccaagaaaagatataaaaattagccaagcatggtagctcacgcctgtagtctcagctactcaggagactgaggtgggaggatcacttgagcccaggagctggagtttgtgataagcagagatcgtgccactgaagtccagcctgggtgacagagtgagaccctgtctctaaaaaaagaaaaaaaaaaaaaaaaggccaggtgcggtggctcacacacgtaatcccagcactttgggatgccaagtcgggcggatcacttgaggtcaggagttcaagaccagcctgaccaacatggtgaaaccccatctctacaaaaaatacaaaaattatctgggcatggtgacacatgcctataatcccagctacttgggaggctgaggaatgagaatcacttgaacccgagaggcggaggttgcagtgagccgagatcatgccactatactccagcctgatgacagagtgagactctgtcccccacccccaaaaaaaaaaaaaagggggcttggcgtggtggctcaagcctgtaatcccaacactttgggaggctgaggtgggcggatcacgtgaggtaaggagttccagaccagcctggccaacatggtgaaaccctgtctctactaaaaatacaaaaattagccagcgtggtggtgcacccctgtaatcccagctacttcggaggctgaggcatgagaatcgcttgaacccaggacatggaggcttgcagtgagccgaaatcttgccactgcacttcagcctgggcgatagagccagactcagtctcaaaaacaaaaaaggactgggcggtggggggcgggcgtgggcgcagtgtctcatgcctgtaatcccagcacagttagggaggccaaggcaggcagatcacctgagctcaggggttcgagaccagcctggccaacatggtgaaaccccatctgtactaaaaatattttttaaaaattagctgggcatagtggtaggcacctgtaatcccagctacttgggaggctgaggcaggagaattgcttgaacccaggagatggaggttgcagtgagccgatacagtgccactgcatgccagcctgggtgacagagtgagactccgtctcaaaaaaaaaaaaaaaagttgtcaggcactcgtctatgtaatcagttttaatctagtaccccatgttcatacaaacacaagaaagaaacactgtatatgtttctcctactgtatagaccactttcctagaagctgcaggccctaggactaacgccagagaaccctggggcgtctgatcaaccccacatgtaacatagagggtaggaaagaatctatccctgaaggagagaaatagagatcagtgtaacatccatcccagctggtaccagccagtgggggacttagaaaatttccaggaaggaacaccaagacatgggactcccgaaggcttagggcctggggcactgccctgcttgcctaggctgaagggtagtactgcctcataggacagttgggaacagtcaatgatgcaaaggacataaatcacttagaacaggggctggcccacagcaagtgctcaataaacacttcttggcctggtgttggtatggtgcttcatacctgtaatcccaacactacgggaggccaaagccagaggattgttcaaagccaggaggttcgagaccagtctcagcaacatagcaagaccctgtctctacaaaaaaatttaaaaactaaaaaattagccatgcgtggtgctgcatacctatagtcccagctactcaggaggctgagataggaggcctccttgagcccaagagttggaggctacagtgagctatgatggcaccactgtattccagcctggggacagagcaagacctcatctcttcaaaaactttttcttttttttttgagacagagtttcgctcttattgcccaggctggagtgcaatggcgcaatctcagctcactgcaacctccgcctcccgggttcaagcgattctcctgcctcagcctcctgagtagctgggattacaagcatgagccaccatgccaggctaattttgcatttttaatagagacgtggtttctccatgttggtcaggctggtcttgaactcccgaccgcaggtgatctgcccaccttggccttccaaagtgctgggattataggcatgagccaccgcgcccaggcttttttttttttttttttgagacagagtcttgctctgtcgcccaggctggagtgcaatggtgcgatctcggctcactgcaacctccacctccccggttcaagcgattctcctgtctcagcctctcgagtagcagggactatagtcacatgccactacacccggctagttttctttttttgtatttttattagagatggggtttcaccatattggtcaggctggtctcaaactcctgacctcaggtgagccacccgcctcagcctcccaaagtgctgggattacaggcgtgagccactgggccctgccctctcttgtcaatttctatagataatttccttcactgagaaatgtgaaaacgaaaccaaaaacagtataaggacattgtgtggaccaaagaaaacatgactaaggttcagacttacagcttgcagcctgtcacgggtgtccaataaacatttgctgactgcccgaaaggctgggctaccctaggatttggctgctgttcactgcactctgccccactttgaccccagagaaaccagggagcccagagacatatgaagacctcaccttccccagctgttcaccagtctccccacatgtgtagacaaggaactcagaaccccagttgttttttaattttttttttttttgaaactgagtcttgctctgttgcgcaagctggagtgcagtggctcgatctccactcactgcaacctccacctcttggttcaagcgattctcctgcctcagcctcctgagcagctgggactacaggcgcccgccaccaggcctggctaatttttatatttttagtagagatgggttttagctatgtgggccaggctggtcttgaactccttacctcaggtgatccacctgcctcggcctcccaaagtgttgggattacaggcatgagccaccacgcccggccccagttgttttttgtttgtgtgtttgtttgtttagagacagggtgtcattatgttgcctgggctggtcttgaactcttggcctgaagcaatccccccgcctcagcccctcaaactgtggagactacaccaccatacccagcccagaacctcctttttctccagtttcctgccttgacatctcaaggggagacagtgatgagcactcgtccatccctggtccttctcctgacactgcccccagccccacttccccgctcacctccccaaaatgcatgtagatgtactcccgggcacgctggtgcaactccacacagccaatctgctcagcgaagttggcgatgccgatggcattgctggggtccagctgctgcaccaggaagtcactgcaggcacggacaacgctgtcgatctggtacatgacagcaccgttcatgacgtggaggacacacttctcgcccatggagatggaggccgtgtaggcgaattcaatgaggcgctccatgaccttggggtggataccctcaatggacaccacctccatgccctgctcccgcagcccgttggtgaacatggccttgaagacagggctggatgaggccagcaccaccttgtgggccatgaactgggcggccggtgcatcctggtacttgacctgcagtgtgacgtcacacagctgctggctgagccgcagctcgttcatgatgccaaaggcctgcttggtatgatcctccagggtgtagctgaaggtgcggttgccatgctgggagggcgtcacctccgccttgcactcagtggaggcgtacatcaccgcgtcccctgccccctcagggcactgtgactgcaggggcaggaatcggcagcaggccccagccccgctaggcctgggatctggctgcatggggttccagaagataagcaacaccaccacctctggcactcagggacctggaggggagagagcacagggcagagggcaggggttgggactgggccagcacctgccgggcctcgttttgcaagataaagcaattcctaggtcagttttcctgcaaagtaggtgaagcagaatccatttgcaaacttgcaaacttccccgacctgatcaacctgattggcccaagagcccatcttaaaacatacatgaagtcatgtctctcccctgctctggatcctccaatgcctcccacagtacctagtaaaactgaactcctcaacagcctgcaaagccctacgcaattagcccctgccacctcttccctttgatcactctgcttcagcaatctggcggcctttccctttctagagcatgttgagctcattccttcatttgcctcaccatttactgggcacctactgtatgccaggcactgatctgggtgctgaagacacagcagtgagcaaaatacaaaaatcctaccctgccagagctgacaactgcagggaggagcaatcataaactaaaataagcaagacctggaaaaacagcttcatgaagaaaattacaacagcattgtgacaacgtgagaatcgggtgcagtttgtttgcttttttttttttttttttcagatggagtctctctgtcacccaggctggagtgcaatggctcgatcttggctcactgcaacctccgcctcccgggttcaagcgatcctcctgcctcagcctcccgagtagctgggactacaggcgtccgccaccacacccggctagtttttgtatttttagcagagactgggtttcgccatgttggccaggctggtctcaaactcctgacctcaagtgagccgcccgccttggcatcccgaagtgctgggattacaggcgtaagccaccatgcctgacccggggtgcagttttttaaaatctggcagaccaagcctctttgagaaggtgaggttggagctgagacaaggatgaaaattattataaagtgggaggctggggagtagttttccaggcagaggaaacagtaagtgcagtggctcagaggctgagacagtcaatctggagaattgggaaggagtgcagtgagagctaaggacttaaggaagggtttcatggaaacccctggatcctggagggccaggagatgagttatgtgttttgtgttttgtttttcgagacagagtctcgctctgttgcccaggctggagtacagtggtgcgatcttggctcactgcaacctctgcctcccgagttcaagatattctcgaccgggcgtggtggctcacgcctgtaatcccagcactttgggaggccgaggcaggcggatcacaaggtcagaagatcgagaccatcctggctaacatggtgaaaccccatctctactaaaaatacaaaaaaattagccgggtgtggcggcgggcgcctgtagtcccagctacatgggaggctgaggcgggagaaaggcgtgaacccaggaagcagagcttgcagtgagccgagatcgcaccactgcattccagcctgggtgacagaacaagactccatctcaaataaaacaaaaaaaagatattctcatacttcggcctcctgagtagctgggattacaggcaccagccaccacgatgggctaattttttgtatttttagtagagatgggatttcaccatgttggccagggtggtctcaacctcctggcctcaagtgatccccctcctcgacctcccaaaatgctgggattacaggcataggctgctgtgcccagacgtgagttacgtttcaaaaggagtgggggatctccaagtggctccccacaagtggatctgcaagttctcactcccctctttctgggactcaactcaaagtctcctcttccctgttttattgtcatcactgcgcttgtcaggaactgaaatgacctcctttgcttgtctgttgatcgactgtctctcgtccccggccccagcgcctcaaatggcagggagacctatgtaggtcggcgtcgggccaaccctctcctgtgcctctcgcctggggcctggcactgcgcaggggtcaataaacgggtggttggctaactgccctgccaccgtgcctgccagagcggcctcctccaccctccctgggtgccactcggcccccactctggtgccaaggccctgggtttgcctcttggtctttggccaatcggtcaacaatgccccttgggcaccgggcacttcccccaccctacaaagcggcaagtgggcgactgcgcatgcccctcctgagcctccaccaggcccagtgaggcgaggaagtgaccccaccgcggcctctcggctgccaaccccagaacgcagatcgagcccctcaacgcctcggagcccccgggcctccttctgcgcagcgcctcctggttctctcgctcggtttccgccgctcccgggccaccccaagagttgcgccgtccaacaaaaatatccacccaggtcgcgccctcctggccctccgagtcctggcggggaactcggaggcgccctgggccgtggcgcccgttttcctggtctccgggcacggccgcaggggcgctcgcggcccgcgatgcccgcagcccgggcacatcccgcctcactcaccccgccatggccgcgctccggctccgcctccaccgcccgagccccggcgcctccatcgctgcgcgtgggggaggcgcggagcgcgcgcaggtcaccatgactaagcagagccgggcgcccgccgtgtcacaataaaagtccccgggccctggcctcaggcggtagggaccgctgaggggccgctccccacccccgcccacgcctgctgtcgcccagctgcgcggccaccacggcgcccagcatggcggcggggcgggggcacgcgaccctgagcgcgcttagccgcgtggtccgagtcgcggggagtctgaaccccgagttccaggcctgcgcgccccggcccgcaccaggggtggggtggacacccctccccgtcgctgctgcccaagcgctcacctcagcccccaggtcgcctccgtagggggtccctcggggtggggatggccggggcgcgcaggggctccgggcacagtgatgccacccgcgcactgcgcttccgggaagccgggggaccgcgacccagtccaggagattcctgccttaccttggctgtaggggacccgcgggcgcctccgccgtcggggggcctcggctccagggctgcgtggcctgcggggtcttggttgtcggttggggagcggcctcgggacgcccgaaaaggaggcggggagagggcggaaagggcgcggcgggaaaggagcggcgattctcccgcccttcccgcaggtgcccggcgcccgtcggcgaggagtggggcatcgggcgggggcgcacagccaggccccccttctcactgtcccttccatctcccgatttcgttgctggatgtctcctcgcggggctgcgcgccaccatctgctattctccttttaacaacgcacagcgccggcctcgtggtccggcggccgcaggatctagggaaaattatctacctcgctaggttttcttttcttttcttttctttctttctttctttttttttttcctttagagacaaggtctcgctctgatctgcacgcccaggctggagtgcagtggcgcaatcgcggctcactgcagccttgagctcctggcctcaagcgatcctcccacctcagcctcctgagtagctgggaccacagacaggcgccaccacacccggctaatttttagtttttgtttgtttgtttgtttttctgtagagatggggtctcgcaatgttgcccaggctggtcttgaacacctgggtttaagagatcctgactccattggcctcccaaagttctgggattataggtgtgaggcgctgtgcccaggcctcaggttttccttgtcttttttttttttttttttttttaattgagacagagtctctcactgtcacctgggctggagtgcagtagctcgatcttggctcactgcaacctccgcctcccgggttcaaaaaattctgcctcagcctcccgagtagctgggattacaggcgcccgccatcatacccagctaattttttgtatttttagtacagatggggtttcaccatgttggccaggatggtctcaaacccctgacctcatgatccgcccgcctcggcctcccaaagtgttgggattacaggcgtgagccaccgcgcccggccttccttgtctttatttttgatttacttcctatcaagaggcgtgtggcacccgtctttggggggttcaaaccctggatctgcctcttaccagctcagtgcccgtgggcgcttacttagttctctatggttcagtttcctctctataaaaagtaataatataatagcacctacctaccagattatcattaagactaaatgcggggccgggcgcggtgactcacacctgtaatcccagcattttgggaggccgaggcaggcggatcacgaggtcgggagatcgagaccatcctggctaacatgataaaaccccgtctctactaaaaatacaaaaaattagccgggcgtggtggcgggcgcctgtagtcccaggtacacaggaggctgaggcaggagaatggcgtgaacccgggaggcggagcgtgcagtgagccaagatcaccgcactgcactccagcctgcgccacagagcgaggctctgactcaaaaaaataaataagtaaataaaaaataaaaatattaaatgcgaatgctggctcccaagagacagaaaccattgctatttttcatgactggggatactgatttgtcatgcacaccgtttatcatgtaacgttaacttttaaataaatgtatgtaagtttattttaaagaattcatctaggctgggtgcggtggctcacatctgtaatcccagcactttgggagccgaggtgggtggatcacgagatcaggagttcaagaccagcctggccaacatggtgaaacccccatctctactaaaaatacaaaaattaaccgggcgtggtggcgggcgcctgtaatccccagctactcgggaggctgaggcagagaattgcttgaacccgggaggcagaggttgcagtgagcagagatcgcgccaccacactccagcctgtgcaacagagtgagactctgtctcaaaaaaaaaaaaaaaaaaagaaaaaaaaagaattcatctaaatttcatccaaattataattatttttaaaagatagagaggccaggcgcagtggctcatgcttgtaatcctagcactttggtaggccaagacgggtggatcacctgaggttaggagttcgagaccggcctgaccaatatggtgagaccgccgtctctactaaatacaaaaaattaaccgggtgtggtggtgggtaagtgaaggttgcagtgagccgaaatcctgccattgcactccagcctgagcaacagcgcgagactacgtctcgaaaggaaaagaaaaaaaaaaaagatagatgggatttcgccatgtaagtgaataataaatggaaactctaggcccctggagcctccagggtgaatttgaaagattgaacgtcctggctcagggtctggaaggaatcacgtgtagggctacgttggagttaccccgctaccccaaatccttgttgcgtgtagatgcagttccagacagctcctcaggggggcggcctagatagtccgtgaacacgctgagtggccgaggttgtaaccagcgccttcctggcacgttgcagaaaacaacctctctaatatctctcaaaatcaaacctacaggtccagtgagccaggtgcttgtagagatttatccaaggtgcactcgcacacatacaggaggaagcatgtgcacacattcattgcattataatgcatatcatggcaaaaggactggatcccattcacatgtccctctgtagagccctggcttaatcagtggtggcacatccttgctaagaaatactatgcagccagttaaaaggagcagtacatttactgtatggatatgtacctagatcttctattttttcttttctctttttctttttcgattttcatttatttatttatttatttatttatttatttttgagacggagtctcgcactgtcacccgggttggtgtgcagtggtgtgatcttggcttgctgcaacctctgcatcccgggttcaagcgattcttctacctcagcctcccaagtagctaggattacaggtgcctgccaccatacccagctaattttttgtatttttagtacagacagcgtttcatcatgttggtcaggctggtcttgaactcctgacctcgtgatcctcccgcctcgtcttcccaaagtgctgggattaccgacgtgagccactgcacccagactctttttttattttatttatttatttttctttttttgagacaaggtcttgctctgtcacccaggctggagtgcggtggcacaatcatagctcacttcagccttgacctcctgagatcaagtgatcctgctgccccagcctcccaagtagctgggactacagtcactcactaccacacccagctaacttccccccaccctttttttctttcttttgtagagctggggcttcaccatgttgcccaggctgatctcgaactcctgggctcgacggatcctccctacttggtctcccagagttctgggattacaggtgtaagccaccacgccccacctctttttttttttttttttttttaacagggtcttgctgtcacccaggatggcgtgcagcagtgcaatcatggctcactgcagcctcgaactcctggctcaagccatcctcctgcctcagcctcccaagtagctgggaccacaggtgtatgccaccacacttggctaagttatttcttttttgtagagatggtgtctcactatgttgcccaggttggtctcaaactcctgggctcaagtgatcctcctgcttcagccctgcaaagtgctgagattacaggcataagtcactgtacctgaccaggcctctatttttttaatgtaaaaaaagagccaggcccagtggcttacgcctgtcatcccagcactttggggggccgaggcgggcagatcacctgaggtcaggtgttcgagaccagcctgaccaacacagtgaaacctcgtctctactaaaaatacaaaataagccaggtgtagtggcgcatacctgtaatcccagctactcaggaggctgaggcaggagaatcacttgaaccccggaggtggaggttgtggtgagctgagatcgtgccactgcactccagcctgtgcaacaagagcaaaactgcatctcaaaaaaagaagtgctatggaccaaattatgcacccgtacccccttttcgtgtgttgcagccctaaccctcaatggaatggtatttggagatggggcctttgggaagcgattaggtctagatgaggtcatgaaggtgggaacctcatgatgggattagtgtctttataggaagagcacaccagaaagtgttctctctttcttttttcttttcttttttttttttttttttttttttgagacaggctggaatgcagtggtgccatctccactcactacaacctccgccttacaggttcaagcaattctcctgcctcagcctcctgagtagctggagttacagatgtgtgccaccacacccagctgatttttgtatttttagtagagatggggtttcaccatgttggccaggctgatcttgaactcctggcctcagttgatccacctgcctcagtctcccaaagtgttgggattatagtcatgagctacctcgcccgacctgctctctgtttctttccccaacatgtgggaacacagtgagaaagcggctgtctgcaagctcagaagagagtcctcactagaacacaaccatgctgacattctctttttttgagaccatgtctcgccctgtcgcccaggctggagtgcagtggagtgatctccgctcactgcaacccctgactcctgggttcaagcgattcttctgccccagcctccggagtagctgggattacatgcgcatgccgccacacccaggtaattttttgtatctttagtagcaacggggtttcaccatgttggccatgctggtctcagattcctgacctcgtgatccacctgcttcggcctcagtgctgagattacaggcgcgagccactgctcctggcctttttttttttttttttttttttttttttccgagacagagtctcgctctgtaatccaggctgaagtgcaatgtcgcgatctcagctcactgcaacctccaccttctgagttcaagcagttctcctgccttagcctccccagtagctgggattacaggcacctgccaccacgcctagctaattttttttttgtatttttggtagagacagctgtttcaccgtgttggccaggctgttctcgaactcctgatctcaggtgatccgcctgcctgggcctcccaaagtgctgggattacaggcgtgagccacagtgtccggccccaggctgccattctgatattggacttcctaccctccagaacgatgcaaaagtaattactgggacttaagccaccccatctagggtatttgttatgcagtccaagctgactaagagcaagacattacaaaatgtgtgggtattgccaggcgctgtggctcatgtctgtaatcccagcacttgggaggccgaggcaggtgaatcacttgagctcaggagtttgagaccagcctcaaaaaaaaaaaaattagctgtgtgtggttgtgagctgtgttgtggttttgagctctgtggttgtgagccaggtgtggtgtggggatatttggtcccagctactacacgggaggctgaggcaggagtagtattgcttgagcctgagaggtggaggctgcagtgggccataattgtgtcaaatgcactccagcctgggcaacacagcaagaccctatctcaaaaaccaaacaaacaagaaaatgtgtgggtgtgcaatatttttgcaagatatacttttcaaaaaaattttttagacaggtcttgctgtatcacccaggctggagtgcaattgtacaatcatagctcactgcagccttgacctcccaggctcaggcgatcctcccactccagcctccccagtgtctgggaccataggcatgtgccactgtgcccgggtgattttttttttttttttagatagtgtctcactctgttactcagattggagtgcagtggcatgatctcggctccctgcaacctctacttcctgggttcaagcaattctcatgcctcagcctcctgagtagctgggattacaggaacctgccacaacgcctggctattttttgcatttttagtagagacggggtttcaccatgttggctaggcttgtatctaactcctggcctcaagtaatcctcccgccttggcctcccaaagtgctgggattacaggcatgagccaccatgcccggcccacctgggtgatttttgaatcatttctagaaactgggtctccctatgttgtgtgggcctatctccaactactgggctcaaatgatccttctgcctcagcctcccaaaatgctaggattacaggcgtgagccaacatgccctgccaagatatactgttaagtcaacaaagcaacatgcagaacagtgataaatttgtacaaaaagacaggaggtgtatttacatttcattttggcaaggtgaatccacagactagctctggaaggtccccaggagtcccactgtgatcgccacaaggaaggggaactgcgtgcttttttttttttcttgagatggagtttcattctttttgccgaggctgaagagcaatggcatgagctcggctcactgcaacctctgcctcttgggttcacgtgattctcctgccttggcctcccaagtagctgggattacgggtgcacgccaccatgcccggctaattttgtattttaagtagagacggggtttccccatgatggccagactggtctcaaactcctgacctcaggtgatccgcccgcctcggcctcccaaagtgctgggattacaggtatgagtccactgcgcctggctgaactggatgctttttaaattttctagaaaactcataagcaagtgtgcctgtgttccaactggttggtttcccgtgtgtgtggcctccaggggcactctgaacgtggccagcagggacttggggtccccccagtctgggacacctgtccccaaaacaccgctttttttgaggttgcctgcagttccaaggtttcccggaaggtggagcgctgcagtctgaacccgaagccagacgccccccaacccggccccagggcccatccagccgttcaggggtcaagaatgcgcctggggacatgccgggggcaggggccagcacgtctggagccttttatgggcacaaacggcgccctggcatcgttccaaccatgaatgcagacccccgtgggagggactgttggcatagccttgccagacccatctggaggggtcagataccaagccagtgcctcctggggcctgaagcttaagctaatgtcctggctcagacactgagacaaggtagtcactgtctggaatttcctcatctgtctaatggggattaggaaacctaccttgcaaagttgctataaggctgaaaaataggtgtgtcccagaactgtgcagaaaactagccagacaaaatgaactcttactttaggccgggtgtggaggctcacacctgtatcccagcacttcgttgttgttgttgttgttgttattgttattttgttttctgagatggagtcttgctcggtcgcccaggctggagtgcagtggcgcgatctcaacttactgcaacctccagcctcctgggttcaagtgattctccctcctcagcctcccgagtagctcggactacaggcgcgcggcaccatgcccggctaatttttttttttttttttgtatttttattagaggcggagtttcaccatgttggccaggctggtctcgagctcctgacctctagagatccgcctgcctcggcttcccaaagtgctgggattacaggtgtgagtcaccgtgcctggcctttatcccagcactttgggaggccaaggtgggttgcttgagcccaggagtttgagaccagcctgggcaacgtggtgagaaatcatctctaaaaaaaaattcaaaacatgtttggtgtggtgctccagtagccccagctactcgggttgggggctgaggcaagaggatcacttgagcacaggagttcaggaggatcacttgaggctgcagtgagctgggattatgccagtgtactccaggctgggcgacagagcaagatcctatctcaaaaagaaaccaaaaaacggccgggcacagtggctctacctgtaatcccagcactttgggaggctgaggcgggcagatcacgaggtcaggagtttaagaccagcctgatcaatatgtgaaaccccatctctactaaaaatacaaaaactagccaggtgtggtggcggtgcctgtaatcccagctactcgggaggctgaggcaggagaatcgcctgaacccaggaggcggaggttgtagtgagccaagattgcagcactgcactccagcctggtgacggagtgagacttcatctcaaaaaaaaaaaaaaggccaggcgcagtggctcacacctgttatcccagcactttgggaggccgaggtgggcggatcacaaggtcaggagatcaagaccatcctggctaacactgtgaaaccccatctctactaaaaatacaaaaaaattagccatgcttggtggcgggcacctgtagtcccagctacttgggaagctgaggcaggagaatggcgtgaacctgggaggtggagcttacagtgagccgagattgcgccactgcactccagcctgggtgatagagtgagcctccatctcaaaaaaaaaaaaaaaagagaaaccaaaaaacctcttatgttttcctaaaagacatgatttcatcacacaggctggagttcagttatgcaaaaatagctcactgcagcccctgagctcctgggttctggaaatcctccttcttcagcctccccagtagctgtgactataggcatgcgtaaccacaactgcctaatttttaaaattttttgtagagatggggtctcactatgttgaccaggctggtctcaaactcccagcctcaatcgatccttctgcctcagcctcccaaagtgttgggattacaggcatgagccactgtgtctggccttattttgttatccttttttttttttttttttttttagaccgagtctcactttgttacccaggctggagtgcagctctttgcaacctccgcctcccagtttcaagggattctcctgcctcagcctcccgagtagctggaactatatgcgtaagccatcacacttggctaattttggtatttttagtagagatggggtttcaccatgttggccaaactggtctcaaactcctgacatcaggtgatctgcccacctctgcctcccaaagtgctggggttagaggcatgagtcacggcacccagcctattattattatttcttttaatgaaggatctgaaactgcatttgaagaaattttattaactgggcatggtggtgcatgcctgtagtcccagctactagggaggctgaagcaggaactccaggcttgatcccaggagttccaggctgcagtgagctataattgtgcccattgcactccagcctgggtgacagagcacaagatcccaactcaaaaaaaaaaaaaagaaagaaagaaagaaaagaaaaataaaaaagaaattttattaccagataggatttggctgagtctcccagagtcaaatttgggggtgccccacccttggcattgtccttgataactttattccactcttacactcaattcctcagtaattctgtctgctgcctctaaaatctatctagaatccacggggtctgggcttagctggaatctccatcattgttcctgtggctcagtgcagccccccttcaccttctctggttttcaacctcccatggaggccacaagacacctgtgatcacctgaattagggcaagtccctcttctgcttagaagcttctatggctcccacctcactcagagcaaaagcgaagtcctctatatcacccacaaggtccttcgggaactactccttcagctccttgtctcctcccattctccccctccgtccctgctccaggcacaccagcatcgctgcatttcttagaacacatgggcacatttcagcctcagggcctttgcgcatgccattccctcatcctgaaatgcttttcttttggtcttcccaggacagaggtctcagctcacatcacaagtcactacctctgcagagaggtcttccctgaccaccatcaccatctctgtcgtttgtcactggaatcatctccattatttcatcaccgagttcttttctgtgttcccaagcagaacgtcaattccacgagggcacagattttttgtctgtttgttcacattgtggggtgtcgctgcataaatacatttcccctgcatcttttccgactgcacctttggctgcatttcctacaaattcctttatgtaaaaagaacaagtctgtaaaacttgggaagacagtcgtgggccgagggtgtcagtctgcagccggttctgataccagagtccgggcggctgtgggtgcaccggggctgcctgtggagccgctggtgtccagcccgtcgcgctggggcgatgagcgctccgagccgctgaagctcccatcaaggcccgggggcaggcagcggcgcaggcccccggaagcctcagccgcgctcgccgactgctgggagccactcgggtctctgccgcaggagtggcgtccgcagcagaccaggcgcaggagcgcgtggcgcaggtcgcggttggtgagcgtgtagatgatggggttcagaagtgagttggccatggccagtcccaggaagggatcggcctgcaggagtacaggacaggtgcgcgccgggcacgccacgtcgagcaacagcagcaggaagagggggccccaacatgccacaaaggccaggagcaccacgctgagcgtgcgcagcaaggccagcgagcgcggcttgcgacgcgcccgggtcgaggtggtccccgcagtcccgggccgtgccggcaggcgccgcgcgttggcgcgtacctggcagtagatgcgcgcgtagagtgcacagatagcggccaggatgcccacgaaggcgagcacgcagaagagcacgtaggccttggcgtagagcggcaagacagtggagcaagcgtccaggcgacccaggcaattccagcccagcgctggcaggagcccgaggagcagcgacacgccccaggccgcggctgccatcgccagcgtgcgcccccgactggagacgggcgcgggccccctgcgcgccatggtgaggctgcgctccagcgcgatggccaggaggctcagcacggacgcagtgagtgccacgaagacgcctccctcccgtgcgaaccagagcgcgggggacagtttcagcgtgagcggccccgacagtaggatgttggcggcgtaggcggcgcctgccagcagatccgacaacgtgaggctgcccaggagcaggaacatgggagcgtggaagcgcgggtggcgtccgagcaccaacaacacggctagattctctagcacgatgaaggcgcacaccgccaggcacaccacggcgtcggcgcgcaggccggcacccggctggtagcgcgcaccgcggagcttgccggtgtagttgtaatgcaggacgatgacctcgctcaccggcgccggccgcagcagccccgactccatgggccgcgcgccccaaggctgttggagaggcaagatacggtgtcaggccgcggtccccgtaagcacgctcgcagcagccggctaagtcgtgggaaaggggccctacccactgaccatcaccccctatacatggtgtccaagggggagttcaggatggagggatagagtccgtggagacagacatacacacaaataatatcacgagggaacaaggtgacatagtcccaaaaaaagggacattaataacacatgaatggctgggcgcggtggttcacacatggctgggcgcggtggctcaggcctgtaatccccgcctgtaatccccccaggctcaggcctgaggcagtggctcaggcctgggaggccaaggggggcagatcacgaggtcaggagatcgagaccatcctggctaacacggtgaacccctccgtctctgctaaaaacacaaaaaattagccaggcatggtggcacgtgcctgtagtcccagctactccagaggctgaggcagaagaatcatttgaacccaggaggcggaggttgcagtgagccgagatcgcatcactgcactccaacctaggtggcagagcgagactctgtctcaaaacaccccccctccccaccaaacacacacacggctgggtgtggtggctcactcctgtaattccagcactttgggaggctgaggcgggaggattgtttgaggcccaggagttcgagattagcctggacaacataggagaaccccgtttctacaaaaattagccgggacgtgttggtgtatgcctatagtccaagctactcagtggagtcccagctgaggtgagaggatcacttgagcccgcggggtcaaggctgcagtcagtgagcattgattgtgccactgtactccagccaggacaacagagcaagactttgtctcaaacacacacacacaaacacacaagcagggagttccagagacgtaacagtaaacacacagaacgcacacaaacgcaacacacacagaaagagacacacaaatacagcgacacactacaagggcaaaacacacagtcacacactatcagggaaactaaaaaatacatcatacaggaacagagtgacgcaggcagaaaaacacagcgaccaaaattcagtcacacgaatacagggtctcccacccagtggcacaggccacaatttcacaacctccactcacactagcctggggcccagtgcaccacactccacactcttgtctcactgcatacaaagctttttcctgccaaaaccccctcatccacccaaaaccccatgagaaagttgctccttggccaggcacagtggctttcgcctgtaatcccagcactttgggaggccgaggtgggagtatcacttgagcccaggagttcgacaccagcttgggcaacatactaagacttcatctctacaaaaaaatttaaaaattagccaggtgtggtgttatgcccctatagtcccagctactcaagagactgaggcgggaggatcacttgagcctgggaggccgaggctgcagtgagccatgatcgcacccctgctctccagcctgggtgacaagagagaaactccgtctcaaaaaaaaaaaaaaaaaaaaaagttgatcctattcactcattttactaaggcagagcctgaggacaggagagagaatccacaagaggcaaacagactcttacagaggggcacacatgtcattaaactgtaataacactcctcacctgcctctgtgaccttattaatccccacttcctttagtcctaatttacagatgagaaaactgaagctcaaaagaaatgcttcgtatcgaagcaggcgcaaaggtttccatgctcccacacaaacatccatgcacaaatagtccccatgcaagtccagatgagaaagccaaggcctggggaggggaatggatctcttttgcacaaggcagggatgcggacatcccagagagcttcagtcacacacagagaatcaaggcaggcaaacatagacaggaagtcgctggctcacccatgctggaggtggggagcccaaatacagggagacagggttacacatgctctgagggggaggccaaccccatccgcccagcttgcccggcagcaggactgaagtatggaaacttgcagtggcccggccaggagggggtggccaggggattccagccaccttcaccccgtatcccaggtcctgcacccagctggggagcccccagcttccccctccccagaggcctccaggaaaagttcggagaactccctgcaaggagtggtgcgcctttttagaccgggaaagtggccgccagggcgaccccctccgggtcaggcccagcccagcgcccccaaaggtccagtgcagtccactcactctgcgccctggtcgtgcgccacccgcagtcgcgctgccttgaaccgagtgagcggacgccgctccgggggcggggctggagctggcaggcgagggggcgggccagcgacgcaaagggccggcggtcgccagcagttgccccctccccttgggtcccgggcactcagcccatggctgccagcctgtgccactcgccgcggcaccggagcgcgccccggcggcgactggcacaggcgagccctcagctgccccctccgggcctgggctgtcctcccagggacgctccatcgcggtgggaggactcggagaggcgggaaagggagggttctgcagcagggcggtcgcagcctgagcctcttctccccagcggaggggtctcctctgtcctgggtgtccgggcactgcgccctcccattgcccacccacctgtgaactgagcttcctgggctgcaccccaaggacgccccgtcgatgattcggaggggtcttcagtgggttgcttagcaggagtcttcagtgggggccaccttagcctgagtcctctcccaccagcagataggttcccgctgctcccgggcacaggcccctcccaatttcccgctcccgcccccggctcagggcgagtgggggtggggcgggcccgggcaggattgtgatgggaacttgccgctcctcagataaggagggtctctcctgtcccaccccctggattccgtgttcccccgaccgattctctcccacccttatcgctgacgacaaagtgatttactcattaatggtgtttctgggctgtgtccttagcagacagtaaaccccagcaatgtaagaatttcttttttttttttttttttgagacaagatcttgctctgtggcccagagtggagtgcagtggcaacatcataagtcactgcagtctcgacctccgcggctcaagccatcctcccatctcagccggctgaacgtagctgctgggactccagtcgcttgcaaccatgcccagataatgaatgagtgtctccctcacttcctctgtatctctctcaggaggatctcagagtctctcgcctgcgtgtctctttgtctctgcgtgtctctttgcctctgcgtgtctctttgttgctgtctgtgatgctctcccacgcctctcccaggccactgctcctccaacgaccagtcccgctggccccgaaacgcccccaccccgacttcccaggaacttccagacggtcccagctcttccaccctcagattcaggaagggaggctgggtcccgctgctgcgaccttctccaggaccgtgccctttgcccctgatgcttcaggccctgctggccgcgggtggggtgagggcgccccaggagagatgagccagaggctgagaataagtgtggatccgggataccctcgtgggaggaaactcagggggcactcaggccgggtcaggcccccatgtagccccttggggatcccagccctcctgcccccgctgttccctcggtgggcagaacctttcctgcctgctctgctcaaagacacagccaatgggacccgcagggtgggacggtgttaacccttcagtgccaggttccccagtcctgtggaccaagccaactccaatggtgcccactgggatgacccctgaagatctcccagcatggctgtggctggcacccagtaggtgctcaataaatgacctccttctgtaaaggggaagccgcgccccagggtggggaggtggctgcttcacacctcccaggcgccaatctcacttctctcgaaaatggggctcttccggctgcgggtcccgggctcagcaacctgcctctccagctgcctccctgaacttctttcccacgaattgggaccctggggactcaggctccaggatctcgacagatgttgggagtcccatccctagctgccactccacactcctggccacagttcttaaaactcagatcacatttcttttctgctccaaaccctcccgtggctccctgtgtttctcagagtaagtgatcaagtcctcagtgaggaccccgcaaggacaaggccatatgccgtcctgatttgtctctttctgttacttctgtgcctctctctgctccactctgcttctgcctcccgggctcctccgagttccacacacacttcaagacttttgaacttgggggccaggtggcctggagcacccttctccccaccccttcccagctggtcagctggtcacctcctcagagagaccttccctgatctgtccctcatctcaaatggcagttggcattatctgaaatcaccttgcttttgctttttttttttttttgtaatctccctttattgcccaggctggagtgcagtggtgcgatttgggctcactgcaaacttcgcctctgcaacctccgcctcctggcttcaagcaattctcctgcctcagcctccagagtagctgggattacaggaatgcaccaccccgcccagctaatttttgtatttttagtagaggcggggtttcaccatgttggccaggctggtctccaactcctgacttcagatgaatcgcccgcctccccctcccaaagtgctgggattacaggcgtgagccaccgtgcccggccaccttgttcatttcatttatttattcatctttcctaatgtgtatctctgacctagagcctcagctccaggaaggcaggtctgtccctctgcccagattcctaaaggttaagggctcacagttttttgatttttctttcttttgtgagacagcgcctcactctgtcatccaggctggggcacagtgccgtgatcacagctccctgcagcctcgactttccaggcttcaagcaatcctctgcccaacctccagagtagctgggaccgtaggtgccagccactgcacctggctactttttaaaattttttgtagagacagggtctcgccaggttacctaagctggccttgaactcctggactcaagcaattcttctgcctcagcctcccaaagtgctgggattacaggagtgagacaggactcaaggtcttgaggcaggcaagtgatacccactgtgagcctcagtggacttatctgtaaaattgagataatagccaggtgcagtggctcatgcctgtaatcccagcactttgagaggccgaggtgggcagatcacctgaagtcaggagttcaagaccagactggccaacatggtgaaaccccatctccactaaaaatataaaacttagccgggcgtggtggcgcgcacctgtagtcccagctactccggaggctgaggcaggagaatcacctgaacctggcaggcggaagttgtagtgagtcaagatcgcgccactacactccagcctgagcaatgcagtgagactccatctcaaaaaaaaaataaaaataaaattgagataaccgcacccactccaaggctgttgttgaagatgaaatgaacagttggaacagagccaaggtatacaatgagagctccacaaatgtcagtgcagctattattggtcaccactgtatccccaaagaagaattagggcaatgggctcataaggaatcagccccagacattgccaccacccgcccccaccccatacctcctcccacaccccacaggccaaactgtctcttcccgggttcagggcacccctggcctctatgttcctgctgtgtcttgcagcagccctcccgcctgaagcatgcctaggccagcacacccgctgggccagttctgctgccagcaccctcgcccacagaggcagctccacccagcgcccgctcttgcagagctgggtctgcaccttcgagagggcaaactgcctcccatggtaccctcagatccccttcacccactcccattcccaccctcctcactccccctgccctttttttttttttttttttttttgagacggagtcttactctgtcacctgggctggagtgcaatggcactatctgggctcactgcaacctccacctcctgggttcaagcaattctcctgcctcagcctcctgagtagttgggattacaggcacgcgccaccacacccggataatttttgtatttttagtagagacatggtttcaccatatgggtcaggcttgtctcgaactcctgaccttgtgttccacctgccttggcctcacaaagtgctaggattataggcgtgagccaccctgcccggtctttttttttttttttttcttgagatagggtctggctctgccacccaggctggagtgcagtgcgcagtgatcttggctcagtgcaacctccaccccgagttcaagggatcctgccactacagcctcccaagtagcatgcgccaccatgcccagctactttttttgtatttttgtagagacagagtttcgccatgttgcccagactggtctcaaactactgggctcaagtgatcctgctgcctcgacctcccaaagggctgggattacaggcatgagccactgcacccggcccacattccctttttcacagccctgaaacttaaatgtggctgcagggaggtgtgaactgacaactttcccacagccagagaacagagaggcagggtttgggggtctcaaacgggaggcccgagggccaactccaactcacatgcacaaggcttgtttgtgcagctcagtgaggtttcacactcaaacagctatccgaactggacagaaatgctgcactctagccagtaaatttgtttctcttagaagtacaaggcaacaggctgggcgcagtggctcacacctctaatcccagcactttaggaggccgaggggggtggatcacctgagatcaggagttcgagacaagcctgactaacatggtgaaatcccaatctctactaaaaatacaaaaattagccgggcatggtggtgcacgcctgtaatcccagctactccgaagactgaggcaggagaattgcttgaaccggggaggcagaggttgcagtgagccgagatcgcgccactgcactccagcctgggtgacagagcgagactccgtctcaaaaaacaaaaagaaaaagaagtacaaggcaacaattctgaaaatgctttcatgctaacattgaacaaataagtacacgtgttgtagatatgaataaccaggtttcatactgttggggaaaaaaaatgacaaataagccaggtactgctgcattgaggttatcagtatgagctcaagtttattttaataaatggataagaaaataaatatagatatgtgaccaggtgctgtggctcacacccataatctcagcactttgggaggccaaggcgggtggatcatgaggtcaggagatcgagaccatcctggccaacatggtgaaatgccatctctactaaaaatacaaaaattagctgggcttggtggcacgtgcctgtaatcccagctactcggaagctgaggcaggagaatcgtttgaaccagggagtcagaggttgcagtgagccgagatcatgccactgtactccagcctggcaacagagcgagactctgtctcaaaaaaaaaaaaaaaagctggacgctatggctcacgcccacaattccagcactttgggaggtcaaggtgggtggatcacgaggtcaggagttcgagacaagcctgaccaacaaggtgaaaccccgtctctactaaaaatagaaaaaaattagccaggcatgggggtgcatgcctgtaatcccagctactcaggaggttgaggcaggagaatcgcttgaacctaggaggcagaggttgcagtaagctgagatcatgccactgactccagcctgggcaacagggtaagactccgtctcaaaaaaaaaaaaatttttttttaattagaatgtggtgaaggttgcaccactctgtaaaatacactaaaaaccacagttgtatatttcaagtgtgtgaatttgatgacatctgaattatacctcaataaagctgttaaaaattatatttgacatttatcaagtggttagttcaaagcggggcaatgtgctgaactttctacaccatgttacattcccacccagaacatcatgtgagaaggaaagggacttttatgtctccactttataggtgtcccagattgagatctgagaggttaagcaagctgtccacagtcacacagaaatggggtgaacaaactacagaggtctggcattggaggcctggcaaccctgggcttcccctccggtcccctgctccttacttgttctaagctgagctcatggcatactgcaatgattttagtttctgccacacacacattctttccagcctccaggtacctggatttgctggttcaatccttctgcctggctgttttcccttttctttttctttttttttttttttttttgagggagtttcgctcttgcccagactggagtggtgcaatggcgcaatcttggctcaccgcaacctccctctgcctcccaggttcaagcaattctcctgcctcagcctcccaagtagctgggattacaggcgcgtgccatcatgcctggctaaattttgtatttttagtaaaggcagggttccaccatgttggtcaggctcctctcgaactcctgacctcaggtgatccaccagcctcagcctcccaaagtgctgggattacaggcgtgagccaccacacctggcctgtttccccttttctttccacatagcctgtgaaatgaatgtctaagtgtgagggcacgagagacagatgtagagagagacagagatagaggaaaggtgccgagtccagagctccacatctcggcctgggaggtgaggggtgccaggggcacctggaagggttgcttggagggaactatccaggaaatgcttggccaccgacctccatctatagcgtttaaagccatctctcttccttggcctggagtttaagccaagctataattcaggacactcctaagaggatgaggtcagattttccccaggagaattcaccaggcctgggggtgagcaggtggcaggagagaggcatggccctgccagagtcctcccagcaccttgggacaaggtgttcccctcccctcactactgtgctgctttctcttcccttctccttcccaactcaaagcctcatctcagagccttttagaatctctgatagaccgggcacggtggctcacacctgtaagcccagcaactttgggaggctgaggtgggcggatcacctgaggtcgggagtttgaaaccagcctggccaacatggagaaaccctgtctctactaaaaaatacaaaatcagccaggcgtggtggcacatgcctgtaatcccagctactcgggaggctgaggcaggagaattgcttgaacccaggaggcggaggttgccgtgagccgagatcacgccattgcactccatcctgggcaaaaagatcaaaactctgtctcaaaaaaaaaaaaaaaaaaagaatctctgataaaatgtacactagggggtgggtgcagtggctcacaccccgtaattctatcactttgggaggccaaggtgggtggatcgcttgaggccaggagttcaaggccagcctgggcaacatagcaagaccctgtctctacaaaataataataaagattatatatatatatatatattcactcatgcgcagtggctcatgactgtagtcccagctacttgggaggctgagacaggaggatcacttgagcacaggagttggaggctgcagtgaactgagatttcaccactgcactccagcctgggcaaaagagtgagatccggtctcaaaaaaacaaacagaaaaaaaccctccagggcaggcacagtggctcacacctgtaatcctagcactttgggaggccaaggccggtggatcacttgaatccagaagttcgagatcagcctgagcaaaataggaagtccctgtctctatttaaaaaaaagaaaaaaaaaaaaatatatacacacacacacacacacacacacacacacacgtacacacacatatatatacgcacacatatatatgtgtgtatatgtgtgtgtgtatatgtatatgtgtgtgtgtgtgtgtgtgtgtatatatatatatatgcagggcgtggtggctcacgcctgtaatcccagcactttgggaggctgaggcgggtgagtcacctgaggtagggagttcgagaccagcctgaccagtatggagaaacccgtctctactaaaaatacaaaatagcccgatgtggtggcgcatgcctgtaatcccagctacaagggaggctgaggcaggagaaccacttgaacccgggaggtggaagttgtggtgagccgagatcgcgccattgcactccagcctgggcaacaagagcaaaactccgtctcaaaaaaaaaaaaattatctgtcctctgtgtattcatccccacctcttccctaacccccggcaacctctgatcttttaactgtcttcatagctttgtcttttctggaatgtcatacaactggaatcacacaacatgtagccttttcagattagcttctttcacttagtgataggcagttaagcttccgccatgtcttttcaaggcttgatagctgatttattttattttatgtttttttacatacatatatatatacatatacatatacatatacatatacatatacacatatacatatacatatacatatacatatacatatatatatatacatatacatatacatatatatatacatatacatatacatatatatatacacacacatatatatatatatatatttgaaacggagtctcactctgttgcccaggctggagtgcagtggtgtgatctcggctcactgcaagctccgtctcccgggttcactccattctcctgcctcagcctcctgagtagctgggactacaggcacccgccaccacacccagctgatttttcgtatttttagtagagatggggtttcaccgtgttagccaggatggtctcgatctgctgacctcatgatctgcccacctcggcctcccaaagtgttgggattacaggcacgagccaccgcgcccagcctttttttgtgtttttagtagagactgggtttcgccatcttgtccaggctggtcttgaactcctgacctggtgatccacctgcctcagtctcccaaagtgctgggattacaggcgtgagccagagcgccctgctattattattaatttttagagacagggccttgccttggcgaccaggctggagtacagcagtgtgatcctagctcactacagcctccaattcctgggctcaagcaatcttccttcctcagccccctgagtagttgggactactccttatgcttggccaggcacagcggctcatgcctgtaatcccaccactttgggaagccaggtgagaggatcactggagcccaggaattggagactagcctgggcaacatagtgggacctcatttctacaaaaatattaaagaattagccaagtgtggtggggtgcacctgtggacccagttactcagggggataaggtgggagaattgcttgagcccaggaggtagagattgcagtgagccaagatcataccactgtactccagagtggctgactgaacaagaccatgtctcaaaataaataaataaacaaacaaacaaacgaaaaaataaactccatactcatttagcaatcactcccattcccccgcctcccaacccatggcaagcgcgaatctgctttctgtgtctatggatttgcctttttttttttttttttgagacagagtcttactctgtcccccaggctggagtgcagtggtgtgatcttggctcactgcaacctccgcttcccaggttcaagcaattctcctgccccagcctcccgagtagctgggattacaggcacgcgccaccatgcgtggctaatttttgtatttttagtgaaggtggggtttcaccaagttggccaggctggtctccaaggcctggcctcaagtgatctgcccgcctcagccttccaaagtactgggatgacaggggtgaaccactgagccccgccaaggatttgcctattttggacattttatatcagtggaatcatataatttattgtattctgtgactagcttcttgcactaagcataatgattgaaggtcaactcacattttagaatgaatcggtacttcattcctttttcttttttttttttttttttgagatggagtctcgctcttgttgcccaggctggagtgcagtggcacggtgggatctcagctcactgcaacctctgcctcctggcttcaggtgattctccctgccccggtctcccaagtagctgggactataggcacgcagcaccacacccagctaatttttgtatttttagttgagactgggtttcaccatgttggtcaggatggtctcaaactcctgacctgatccacccgtcttggcctcccaaagtgctgggattacaggcatgagccactgcgtctggcctttttttttttttttgaaatagagatggggtcttgctatgttgtcctgatctcatgggcccaagtgattctcccacctcggcctcccaaagtgctgggattacaggcatgaaccatcgtgcccagcccaacttaattcctttttatggctgagtaatattccattgcatggacaaatataggacattttaattttctattcatcagctgatggacatttgagttttctctactttttacctggcaagaataatgctgctatgaacatttccatacgtgcattttatatgtttgtatgttttcttatctgttgaatatatacctaggcatgcaattgttggctcatattagaacctgaggaattgttttccaaagcaaacaactagactcttttcttttcttttttatttcctttcctttcctttcttttcctttcctttcctttccctttccttccttccttccttcctctctctctcttttttttttgagacagggtctcattctgttgcacagattggagtgcagtgttgttgttatcatggctcactgtaactccaaactcctcggtttgagtgatcctcccacctcagcctcccgagtagctggaactacaggcatgtgccaccacacctggctaattttttttttttttgagacggagtctcgctctgttacccaggctggagtgcagtggcatgatctcggctcactgcaagctccacctcccgagttcacgccattctgctgcctcagcctcccgagtagctgggactacaggcgcctgccaccacgcctggctaatttttttgtactttttagtagagatggggtttcaccgtgttagccagtatggtctcaatctcctgaccttgtgattcgcccacctaggcctcccaaagtgctgggattacaggcgtgagccaccgcgcccggcctacacctggctaatttttttgtattttttgtagagacaaggttttgccatgttggccaggctggtctcgaacacctgggctcaggtgatccaccttccccaggctcccaaagtgctgagattgtaggcatgaaccactgcacccagcctagaccattttctaaagcaatggcaccactggccaggcatagtggcccatgcctataacctagaactttccgaggctggtgtgggaggatcatttgcccccaggagttctagaacagcctgagcaacataacgagactcccatctctacaaaaaataaaaagttagccatggtaatgtgcacctgtagtcacagctactcaggaagctgatgtggaagaatcacttaaacccaggagttccaggttacagcgagccatgatcacaccactgcactccagtctgtgcaacaaaatgagaccttgtccctaaaaaaaacacaaaagaaaaagaaggaagaaatgcatttaaaaaaataataataagaccgggagtggtggctcacgcctataatcctagcattttgggagccagaggcgggcggatcacctgaggttgggagctcaagaccagcctgaccaacatggagaaaccctatctctactaaaaatacaaaattagccaggtgtggtggtgcatgccagtaatcccagctacttgggaggctgaggcaggagaatcgcttgaacccaggaggtggaggttgtggtgagccaagaccatgccattgcactccagcctgggcaataagagtgaaagtctgtctcaaaataataataataataataataataataataaaacaatgacaatattttaccttcccaccggcaatgtataaggattacaatgtctctgaatcttcaacaacactcgttaatttcttctttgtttgtttttgttgttgtttgttttttgttttttgtttttttgagacggagtttcactctgtcacccaggctggggtgcagtggcgcgatatcggctcgctgaaacctccacttcctaggttcaagtgattttcctgcctcagtctcccgagtagctaggattacaggcgcacgccaccatgcccagctactttttgtatttttagtagagatggggttttgccatgtaggccaggctggtctcgaactcctgacctcaggtgatctgcctgcctcagcgtcccaaagtgctgggattagagatatgagccactgcccccagacctattttctgatttttattgtggccatactagaagacgtgaagtggtgtctaattgtggtttggatagttattactagctgggtgtggtggctcacatctgtaatcccagcactttgggaggcacaggggggagaattgcttgaagccaggagttcaagactagcctgggcaacaaagtgagacctcatttctaaaaagaaaaagaaaacattagccaggcctggtggtgtagtggtgggcctctgcagtctcagctactcataaggctgaggcagggaggatcgcttgagcccaggagttcaaggctgcggtgagccatgttcacgttactgcattccagcatgggcgacagagcaagatcctatctaaaaaaaaatagaaacaggctgggcatggtggctcatgcctgtaatcccagcactttgggaggccgaggcaggtggatcacgaggtcaggagatcaagaccatcctggctaacacggtgaaaacctgtctctactaaaaatacaaaaaattagccgggtgcagtggcgggcgcctgtcgtcccagctactccggagctgaggcaggagaatggtgtgaacccgggaggcggagcttgcagtgagcggagatcaccccactgcactccagcctgggtgacagagcgagactctgtctcaaaaaaaaaaaaaaaaaattagaaacaggccgggcacagtggctcatacctgtaatcccaacaatttgggaggccaaggtgggtggatcacctgaggtgaggagttcaagaccagcctggccaacatggtgaaaccctgtctctactaaaaatacaaaattagctgggcgtggtggcacatgctgtaatcctagatactttggaggctgaggcaagagaatcacttgaacccgggagacagaggttgcagtgagccgagatcacgccactgcactccagcctgggcgacaagagcgaaactccgtctctattgatcacgacactcacagtgcagtccatccttcttttctttctttttttttggggggggctgtgggggttaaggtctcactctgtcacccaggctagagtgcagtggaacacagtttattgcagccttgaccttctgggctcgaatgatcctcttccgttagcctcccaagtagctgggatcacaggcatgcaacaccatggccagctaattttttcatttttagtttttgtagaaatggggtctccacatgttacccaggctggtctggatctcctgggctcaagtaatttacccaccttggcctaccaaagtgttgggattataggcatgagctcactgttttacccaagctggtcttgaactcctggcttcaagggatcctccaacctcgccctcccagaatgttgggattacaggtgtgagctaacatgcctggcaaacagcatacattctttttattgctttaataaaaatgtaattttgtttctctttgaaggatactgttgagaagtgtaattactatgatgtataatttgtccacgtaggggtacttgctttttttttctttacttgactctttgttttttttgaggcagagtttcactcttttgcccaggctgaagtgcagtggcgcaatcttgcctcactgcaacctcctcctcctgggctcaagtgatcctcctgcctcggcctcccgagtagctgggactacaggcatctgccaccaggccagcctaattttcttttctttctttctttttttttttttgagacagattcttgctctgtcacccaggctgggtgcagtggcacaatctaggctcactgcaacccctgcctcctggattcaagccattctcctgcctcagcctccccagtagctgggattacaggcgtgtactgccacgcctggctaatttttgtatttttagcagagatggggtttcaccatattggccaggctggtctcgaactcctgacctcgtgatccgcccaccttggcctcccaaagtgctgggattacagatgtgggccactgcaccgggccctaattttgtattttcagtagagaacaggtttcaccatgttggccaggctggtctcaaactcttgacttcaagtgatctgcctgccttggcctcccaaagtgctgggattacaggcatgagccactgcacccagcctccagtgtctgggaatgtgccgtttgtcttaccaggaatacatttccttcccccccttttttttttttgctaactcctactcatccattagattccatgatagacatttctagcatagacaacaatccattgaatgaaaaactgccatttgcagatagctggctctcctgactaattctgaccattgaagtgggagtgaggtggcatacattattctatatgtctttcagttctgaacagaggcatccaaaaacttatgcatggctctcctgtctgcctcttgctcctctgtgataactgaagcagagagtttcagatagtgcagccacaagatgacgggagacttgtcatcctgggctcctgaatgactgtgtggagctgagcccctgccagtccatataggatgaatagcctgagggagaaatcaactttgattgtgttaaaccactgagctttgggctggtttgttactgcagcaaatcttgacctactctgactaatacagaacccaacttaaatgtggcttccccagagaagtcctcctggatcacagcccccagaatcagtttcttccccttttgtaagcttgtatgttcttacttgatcattactgcaaacataactgtataattatttgtgtaatgagttcatcatctctctgctccaccccatctccaaaaccccaaggggagacaacagtgtggattttccattgctgcagcctggactcaaaatagtgtctgatgcatagtaggtaccctggatacatttgttgaatgaaagagttttgtggcagggcgcggtggctcatgcctgtaatcccagaactttgggaggccgaggcaggctgatcacgaggtcaggagttcgagaccagcctggccaatatggtgaaaccctgtctctactaaaaatacaaagttagctgggcatggtggcacgtgcctgtagtcccagctactcgggaggctgaggcaggagaatcgcttgatcccgggagatggaggttgcagtgagccgagatcatgcaactgcactccagcctgggcaacagagtgagactccgtctcaaaaaaaaaaaaaaaaaagaaaagaaaagagagagagtttttcatcctttcagccaaaggcagcaagaccaggcacagtggctcatgcctgtaatcccagcactttgggaggccaaggcgggccgatcttctgaggtcaggagttcaagaccagcctggccaacatggtgaaaccccgtctctactaatagtaaaaaaattagcctgggcatggtggtgcaagcctgtaatcccagctactcaggaggctgaggcaggggaatcacttgaaccctggaggtggaggtcgcagtgagccaagattgcgccactgtactctggcctaggcaacagtgagactctgtctcaaaaaaaaaaaaaaaggcagcaattagcaggactcttttatagaacatcattcatgtaacccacagggtaatggatgcatgagaggcgggactggatggccccaagaaacaggggaagtttgacaaggaacatgatctattgtgagaaagtacctatccacatagttaacgttttcttcaagactgtaatttgttccaacaactgctctgcctgggagggatttccgggcatgatttatttcactaagaggcatgggaactgggtggagatgcatggaaacattttttgaatagttgagaggcccaggataaaattcatgcacagacgccacaatgcagtcagtagaaggaaatgttatcttattgggttctactcaagggcagttttgagtcagtgctctaatgccaccatactgatttgttttctcaactctattaaggaatacttgacatgtaataagctgcacatacttaaaatattccatagcagaacatgggggcacatgcctgtaatccttgctgctcaggaggctgaggagggaggatcacttgagcccaggagtttgaggctgcaatgagctgtggtggcgccactgcactccagcctgggagacagagtgagacgataacaaaaataaaataaattagctggccaggcgcggtggctcatgcctgtaatccacacctgtaatcccagctctttgggaggccaaggcgggtggattgcctgagctcaggagttcgagactagcctgggcaacacagtgaaaccccatctctactaaaaatacaaaaaattagccaggcgtggcagtgtgcacctgtagtcccagctacttgggaggctgaggcaagagaattacttgaacccaggaggcagaggttgcagtgagcggagaacacaccactgcactccagcctggacaacagagtgagattccgtctcaaaaaataaaaataaaaaataaaataaattagctgggtgtggtggcgcatgactataatcccagctactgggggaggctgaggcaggagaatcgggagaatcgcttgaaccgggaggcggagattgcagtgagccgagatcgcagcactgcactccagcctgggtggcagagcaagtctccgcctcaaaataaatgaataaaataaaatagtctagttcctgtacatcttctccaacactcattaaggtcagtgtttctcattttagaggttctagaggattttggggggtatctgatttctatgttattttgaattttcccgatggctaatgatgttcagattctttttttttttttcccacagaaccattcaagtgtaactttttttttctttttatagagacggagtttcactatgttgcgcaggctggtcttcaactcctggcctcaagcaatcctcccacctcagcctcccaaagtgctgggattacatgtgtgagctaccatgccagtctttttttttttctttatagagaccagttctcactctgtcacccaggctggagttagtggcacgatctcagctcgtcacaacctccggctcctgggctgaagctatcttcccacctcagcctcacaagtagctaagaccagagacatgtgccatcaagcctgcctattttttttttttttttttgtagagacagggtctccccatgttgcccaggttggtctcaaacttgaactcctgggctcaagcaatcctcctgcctcagcatcgcaagtgctgggattacagtcatgagccaccgtgcctggccataatggatattcttttttttgagacagggtctgtctctctctggtaaccaggctggagtggagtgcagtggcgcactcacagctcactgcagcctccacctcctgggctcaatgctcccacctcagcctctgaagtagctgggactacagatgagtgctaccctgcccagcttttttttttttttttttttttttttttttgtagagaccatggtctcactatgttgcccaggctggtctcaatctccttggctcaagtgatcctcctgccctggccttccaaagtcctgggattacaagtgtgagacactgcactcggctgagagttttgttcttacagccgacttacagattcacaagcaatgacacagctgattaggaatgatggcaagtgtgatcaggtggacctgagaacacacacagggcgacttgcccaagctggaggtcaggacaggcctctgagctgtgggtgggcaagctgaggcctgctggagaagagggagaaaccgactccattcatttccaggcttgcagtaattaattcgcacaaactaggtggtttaaaacagacgtgtattctctcacagctctggaagctagaagtccaaagtcaaggttggtggtagagctatgccctgtctgaaggctctagaggggaattcatagctgggtccttcctagcttcccatggtctttttgtttgtttgtttgtttgtttgtttttgagatggagtttcgctcttgttgcccatgctggagtgcggtggcacaatcttggctcactgcaacctccacctcccaggttcaagcgattctcctgcctcagcctccttagtgcaggtgcctgccaccacgctcagctaatttttgtatttttagtggagacagggttttgccgtgttggccaggctggtctcgaactcctggcctcaagtgatccgcccacctcagcctgccaaagtactgggattacaggcgtgagccactgtgccccacccatttgacaaaaattttttaaaattagccaggcgtggtggtgtgctcctgtagtcccagctactcgggaggctgaggcaggaggacagcttgattcttgtagttggaggctacagtgagctatgattacaccactgcactcctgggccatagagcaagatcgagtctctaaaaattaatcaatcaatctgcaaagactctatttccaaataaaggcacattcacagatacccagggttaagacttccacatgaatatttggaggacagagaattcaacccacaatccaggctgacctgtgacagtgacagttatttggcatccaaagtgtggctacgagttcaatcttggaaagcctgggacagcccagccagggggttcctgaggtgtaggtgcgtggtgactggcttttttaagggcacgaatcttttgggagcagaaggaggaagacaggaggaagggaagaaattgttgagagacctgggtcagtctcaccagactgagtgcagaagccgaagacccctggcctctacactgggctcaaagtggtcaactccacggccaggggcaatggctcacacctgtaatcctagcactttgggaggctgaggcaggtggatcacatgaggttaggagtttgagaccagcctggccaacgtggtgaaacactgtctctactaaaaatacaaaaattagccgggcatggtggcacgcgcctgtaatcccagctactagggaggctgaggcaggagaatcgcttgaacccaggaggcggaggttgcaatgagccgagattatgccactgcaatccagcctgggcaacaagacggaaactccaactcaaaaaaaaaaaaaaggtggtcaactccaacagaatgtagtggtgtgtgcccatggtcccccctactcgggaggttgaggcaggatcgtttgaacccaggaggtcaaggctgcagtgagtactgattgcactactgcactccagcctgggtgacagagaccttgtctctatttcattacatgttgagatgataacattttggatgcgttgggataaataaaaagaattattaaaattgatatcacctgtttctttttacttttaaaaaatgtggctaatagaatattgaaaattatatttcatgttatttttctactggattgtacttctccaattttgggttggttttttttttttggtttgtttgtttttgttttgttttgtttttttaaacggagtctcaatcccgtcgcccaggctggactgcagtggagcaatctcagctcattgcaacctccacctcccgggctcaagcgattctactgccttagccccccgaatagctggaactacaggtgcctgccactatacccagctaatttatgtatttttaatagagacagggtttcatcacactgtctaggctggtctcgaattcctgacctcaagtgatctgcccgcctcggcctcccaaagtgctaggattacaggtgtgagccacagccgccggattcttttccagatttttttggcatgatggaatttgtttataaaaataccgttctaagctgagtggggtggtgtgtacctgtattcccagctactcgggaagctgaagtcggaggattctttgagctcaggagttggagaccagctagctagggcaacacagcaagaccctgtctcaaaaaaaaaaaaaaaacattaaaattaaaaaacagctaggtccttctagctgtttgtggatttgaggggtcagacatagcagctaagagaccagggactaggatgatggatgctggacccaggagggcagtggtgggaataagaataacaagaacagtcataattcacactgacgtggtggagaccatgtgcctggcactgttcaaagcattgtgcatattcacttcatccttctcccaaacactagaagggaggcagtatcactaccccatttggcagataaagaaactaagacagtggccgggcaccgtgactcacccctgtaatcctaacactttgagaggctgaggcaggaggatcacttgtgcccagggattcaaggctgcaggaagcaatgattgcaccatcacacttcagcctgggcaacagagtgagaccccgtctctctctctttttttttttttccaatgaatcaattttattttcagactttcatagttagtctaattaaatcaatttaaagttctcactttcttgacatgcttaagaagtatagtgtagtgggtgaaatcatagacgccggagacaggacttcctgggttagaattccagatcagcaacttactagaatgaaaccttggccacattatgtcatctctttgtgtctccatttgctcattgcttggcgataggtgattgtctcaccgctcagcgataggcgatggtctcaccgctcggcaattggcgaaggtcccatctgggtcgccaaaatgtgtccggaattggtgggttcttggtctcactgacttcaagaatgaagccgcggaccctcgcggtgagtgttacagttcttaaaggtggcgtgtccagagtttgttccttctggtgttcagatgtgttcggagtttcttccttctggtgggttcgtggtctcgctggctcgggagtgaagctacagacctttgcggtgagtgttacagctcttaaaggcagtgtggacccaaagagtgagcagtagcaagatttattgcaaagagcgaaagaacaaagcttccacagtgtggaaggggacccgagcgagttgcccaaccccatctctcaaagaaaaaggaactgaggcagagagtggcgaggtcccttatctgagccatctggctgcacagtctgtactgagtgcagaatccaaagacccctgggcctacactgggctcaaagtggtcaactccaatggaatgcggttgtgtgtgcccacggtgccagctactcaggaggctcaggcaggatcacttgagcccaggaggtcaaggctgccatgagtcctgattgaaccactgaactccagcctgggtgacagagtgagactctgtctcgaaaataatacacttgggcacagtggttcatgcctgtaatcccagcactttgagaggctgaggagggcagataccctgaggtcaggcgttcaagactagcctggccgacgtggcgaaacctgtctctactaaaaatacaaaaaattagctgggtgtggtggcgcgtgcctgtaatcccagctactcgggaggctgaggcaggagaatcacttgaatccatgaggtcgaggttgcagtgggccaagatcgcgccactgtactccagcctgggcaacagagtgagactctgtctcaaaaaaaaaaaaaaagggaattggggttggacgcaatcttgagggtggggccctcacaccattctcctgcctcagtctcctgagtagctgggactacaggcgcccgccaccatacctggctaattttttgtgtttcactgtgttagccaggatggtctttatctcctgacctcgtgatctgcctgcctcggcctcccaaagtgctgggattacaggcatgagccaccgagcccggctgagaccaggatgtcaaggcttcagtgagccaagatcatgatgccactgcactccagtactggcaacagagtgagactgtgagaaaaaaaaaaaaaaaagaaaggaaggcaggtgagaggatataagataagaagagaatctcagctgggcgcggtggctcacgcctgtaatcccagcactttgggaggccaaggcaggcagatcacctgaggtcgggagttcgagaccagcctgagcaacatggagaaaccctgtctctaccaaaaatacaaaaaattagccaggtgtggtggtgggcgcctgtaatcccagttactcgggaggctgaggcaggagaatcgcttgaacccgggaggcagaggttgtggtgagccgagattgccattgcactccagcctgggcaaaaactccatctaaaacaaaaaaacaaaacaaaacaaaaaatagaagagaatcccaccaagaaccatgctggcaccctgatctgggactttctagcctctagaactgtgagaagcaaaggtgtgttgttttagcccccaaggctatggtatttgtcacagcagcccaaggggataaagacagtaaggttgtgataactactcccatgcggcggggagggggaaaaaggcagggaagagaaggagaccaaggatggagatgggggagaattttgagagtggtaatcttcgtgtaggggtgatatttgaataaagacttgcggccgggcacagtgtctcacgtctgtaatcccagtactttgggaggctgaggtgggtggattacttgaggtcaggagttcgagaccagcctggccaacatggtgaaaccccatttctactaaaaatataaaaattagctgggtgtggtggcacatgcctgtaatcccagctactcaggaggcaggaggatcactggtgcccagaaggtcgtggttgcagtgagttatgatcgtgccactgcactccagcctgggcaacaaagtgagaccctgccaaaaaaaaaaaaaaagacctgaaggaggtgacggagagccatggtaagaaacgtggtctgggcagagggaacagcaagtgcaaagactctgaggtggcattggctctgttgagtttgagaaagggtgcacttggctggttgcagtggctcaagcctgtaatcccagcactttgggaggcccaggcgggcagatcacctgaggtcaggagttcaagaccagcctggtcaacatggtgaaactctgtctctactaaaaatataaaattagccgggtgtggtggctcacacctgtaatcccagctactccagaggctgaggcaggagaattgcttgaacctgggaggcggaggttgcagtgagctgagattgtgccagtgcactccagcctgggctacagagcaagactctgtctcaaaaaaataaaataaaataaatcaataaattaataaattaatgaaagagaaaggggtcaattgtgattgaaggcgactgggaggagaggggaaaaaaggaaagtcagggaggtgactgccccttttgtgccttctccttcttggatcacaccctcattcaaatctttcttacctccttcagagagctgaggacagagccccggggctggccactagaggccaccctctccatggctcacagggtcactgcattgtcatcatgcagttggctctcactgagccccaactgttcctcaaataccactctaagcactttacattggtaagttcagctcattcccatacatctttatgagttagacacatttaaaactttttcctggctgggtgcaatcgctcatgcctgtaatcccagcactttgggaggccgaggctggcggatcacctcagtcaggagttcgagaccagcctggccaacgtggtggaatcctatctctactaaaaatacaaaaattagctgggcgtggtggtgtgcgcccgtaatcccagctactcaggaggctgaggcagcagaattgcttgaacctgagaggtggtggttgcagtgagccaagatcgcactagtgcactccagcctgggcaacaagagcgaaactccatctcaaaataaatacataaataaatgaaaataaaataaaaaataaaaattgtccctggccaggtgcagtggctcatgtctgtcatcctagaactttgggaggctgaggctaatcgtttcagcccaggagttcaagactagcctgagcaacactgggagactctatctctacagaaaaatttttaaaaattagccaggggtggccaggcacggtggcccacgcctgtaatcccagcactttgggaggccgaggtgggcggatcacgaggtcaggagatcgagaccatcctggctaacacgatgaaacctcgtctctactaaaaatacaaaaaatcagccaggcgtggtggcgggcgcctgtagtcccagctactcgggaggctgaggcaagagaatggtgtgaacctgggagacagagcttgcagtgagtcgagatcgcgccattgcactccaacctgggcaacagaacgagactccgtctcaaaaaaaaaaaaaaaaattagccaggggtggtggcatgtgcctatagtcctagctactcaggtggctgaggcaggagacttgcttaagcctcggcagttgagactgcagtgagccatgatcaggccactgcactgtagtctggatgacagagcaagaccctgtctcaacaacaacaaccaaaatctgtttgggcctcgcaaggttagagaaaaaaaattaaaaaataaaataaaataaaatattttcctgtagtctcagctacttgggaggctgaggcaggaggatcacttgagctaaggagtttcaggccagcctgggcaacatagagagaacttgtctctataaaaagttaactgattactttttaaaacaaagaggttttttttcagccttattgaggtataatagacatatacaaaaccatgcaaattttaagcgtacaatctgatgagttttcacacctgtgaagccactattacagttaagatactgaatttatccacagctccaaaaaatgtcttcctgcctgaggtggtggctcacgcctgtaatcccagcatttgggaggctgaggcgggaggatctcatgaagccaggagtttgagaccagcctagacaacatagcgagaccccttatctacaaataaaatttaaaaaattaaccaggcatggtggctcctgtctgcggtctcagctactctggaggctgaggttggaggatcagagttggaggctgcagtgagctatgaaagcgccactgcactccagtctggacaacagagccagatgctgtctcgacaaaacaaacactgaaaaaaactttcctggagcacttcattcatccctccctcccgcgcctgcctacccctggattttttttccctgagcataattctcatgaagattcgtctatgttgttgcgtgtattccagccctattttgcacatgaggaaactgaggcacagagaggcgtggcttgccccggaggtcacactagtcgatttggtcccaggccagggcgggttctgggtcggcagcccgcgcaggtgcactcgggaggcggggcgggcgctgcaggtgcgcagtcagtctcacctgggcgcctgccaggaggtcagtcctgggccctggggggcaggactaggggcggggccaggggcaggggttccccagctctgctgcctccgataagggcctgaaggggctgtcgcgctcctggcggtgtgataaggagggcggggggaggccgcgggaaggcgtcggggtttgaggtccccgcctggcgacccgggatcggggcaggaaaggcggctgggcggggagagggcggggcggggcgtctggcttggccacgcccaccgtcatccggggtcctggcccgctaagatggcgatggctgcggtagcagcggcggcggctgttgcctggcccggtaccctggggacgggggccgagtagcgccttccccgggccccgtgaaccggctgcgggtcgcccttggggggcagcggccgcagccccccacctgggccctcggtccgccctcccggcgcgtccatgaactcagtgtcgccggccgccgcgcagtaccggagcagcagcccggaggacgcgcgccgccggcccgaggcccgcaggccgcggggtcccagaggcccagaccccaacggcctggggccttccggagccagcggccccgctcttggctctcccggggctggcccgagtgagccggacgaagtggacaagttcaaggccaagttcctgacagcctggaacaacgtcaagtacggtgaggagggggcccggagatcgtgggggtgtcgggggccgttgaggaaaaccagaccccggtcctgccagttatcccacccttgttcccgtcctgagtcacctgtgggtcccctccctgcccggcccagggtggacctgtggcaggtccaatagtgttttcaagccccgcccattcccctgtgtgaccttgggcaagatcctttgcttcctggcgcctccgtttttgcccctctctgtaaaatgggtacaataatcagaactaccttccttcatcctgaattgatggtggacactcctgtagctgtcactgggggccccacctccgacggaatccccggagccaccccggagataggaactaggatcgtgcccatttcacagatgggggaatggaagcgctgttgctgtcatgcaagtgcttcatctcgctgggcgctgcccctacgtctccccaggttgggtggttaaaagccggaccagctttagcaagatctccagcatccacctctgtggccgccgctaccgtttcgagggcgagggtgagctggtggttgggaccagggctgggggaggcctctccacgcccgccggagtgtccctggtggcagctgacagacccgctcttgtaggtgacatacagcgtttccagcgggactttgtgtcccgcctgtggctcacataccgccgggacttcccgccccttcctgggggctgcctgacctcggactgtggctgggggtgcatgttacgcagcggccagatgatgctggcacagggccttctgctgcatttcctgcccagaggtgagccataggggggaaggggtgcactaggagtacagggtcaactgccatatcagcagtattagaattacttaccaactaagagttcaaagtcacgttagaattgtgtgtcaagtaagttttggagagatgagagttgtttataagagtttcagccggggttggaaacggtggctcatgcctgtaatcctagcactttgggaggctgaggcggatggatcccttgcggtcaggagttcaagaccagcctggccaatatgatgaaaccccatctctactaaaaatacaaaaattagccggttgtggtggcacacgcctgtaatcccagctactcccgaggctgaggtgggagaatctcttgaacccaggaggcggaggttacagcaagccaagatcgcaccactgcactccagcctgggcaacagagggagactctgtgtcaaaaataaaaataaaaaaaagtttcaccaggcacggtggctcatgcctgtaatcccagcactttgggaggctgaggctggtggatcatgaggtcaggagttcaagaccagcctggccaagatggtgaaaccccatctctactaaaaatacaaaaattagctgggtgtggtggcaggcacctgtaatttggcaaggtaaagcagagaattgcttgaaccggggaggcggaggttgcagtgagccgagatccgtgccactgcactccagcctgggtggcagagcgagactcagtctcaaaaaaaaaaaaagagttttggctgggcactgtgctgcatgcttgtaatcccagctacctgggaggctgaggtgggaagattgctcgtgcccaggtgttcaagtctgcagtgaactatgatcctgccactgcactccaacccgagtgacagaatgagactccaacaataacaggtcgagtgtggtggctcatgcctgtaatcccagcacattaggaggctgaggcaggaggatcgcttgagcataggcattcgacaccagcctaggccacatgacaaggctcctgtctctacaaaaaaattttaaaaattagctgagtgtggtggcatgtgcctgtgatcccaactactcaggaggctgaggcgggagaatctgttgagctcaggatttagaggctgtagtgagacgtgattgtgccactgcactccagtctggatgacagtgagatcctgtctttatttatttattttatttattattattattatttttttttttgagactgagtcttcctctatcatcctggctgaagtgcagtggagagatcttggctcactgcaacctctgcctcccaggttcaagcgattctcctgcctcagcctcctgagtagctgggattacaggtgcccgccaccacgcttgtctactttttgtatatttttttttttatcagagaaggggtttcaccatgttggccaggctggtctcgaactccaggcctcaagtgatccacctgccttggtctcccaaagtgctgagattacaggcatgagccaccgcgtctggctgagatcctgtctttaagtaacaaaaaataaataaataaataaggataagtatatgtttcaggaatatgtaaattctgttgaattacggggttcaggagcattcgcattgtgtgcggtgcatgtgtagatgggacctctgccccccacacactagcactgtttgactatgtgctccattccaccagactggacatgggccgagggcatgggcctgggcccccctgagctgtcagggtcagcctctcccagccggtaccatgggcctgcccgctggatgcccccacgctgggcccagggtgcccctgagctggagcaggaacgccggcaccggcagattgtgtcctggttcgccgaccacccccgggccccctttggcctacaccggctggtggagcttgggcagagctcaggcaagaaggcaggtgactggtatgggccatcgctagtggcacacatcctcaggtgagggctgctgcagggatcacgggagttgctgggtacccgcaggcactcaggccttccctcctgcccccaggaaagccgtggagagctgctccgacgtcacccgcctggtggtgtacgtttctcaggactgcacaggtaaggggctgggagccaagatcacaggggccccaccctgagccagactctgccttacccgattcttagagtgcatcttcctcagaggctggaacaagttgtggggcagagggacactggggaaggatgcaaggcctgtgcagtgggagatagtccctcttctccgtctctccctctggaacaagaaacttcaggggcttctccttgagtgatagaatagagacataaggccaggtgtggtggcacatactgtagtctcagctacttgggaggctgaggtgggaggattgcttgaacccaggagttcgaggttacagtgagctgtcattatgccattgcactccagcctgggcgacagagtaggatcctgtcgaaaaaaaaaaaaaaaaaaaaaagaggccaggcgcagtggctcacgcctgtaatcccagcactttgggaggccaaggtgggtggatcacctgaggtcaggtcactctgtcacccaggcttcagtgcagaggcacgatctcggctcactgcaacctctgcctcctgggttcaagcgattctcctgcctcagcctctcaaatagctgggattacaggcacgcaccaccataccaggctaatttttctatttttagtagagatggggtttcaccatgttgacaaggccggtcttgaactcctgacctcaggtgattcgcccactttggcctcccaaagtgctgggattacaagcttgagccactgtgcccagcccctgtaatttttttttttttttttttttttttttttttttttttttttttttgagacagagtctcactctgtcacccaggctggagtgcagtggcacagtcttggctcactgcaacctccgcctcctgagttcgagtgattctcctgcctcagcctcccaatagctgggactacaggcgcgtgccatcacgcccagctaattttttttgtatttttagtagagttggggtttcactgtctttgccagtatggtctctcgatctcctgacctcatgatcccccctcctcggcctcccaaagtgctgggattacaagctggagccaccgtgcccggctacctctgtaaattttttatgcaaaattgtaggtgtttgggaaaagattcgattttcagagaaccttatctccaaaatgggtctaatctacttctctaggagcacaaaatgggcttacgtagctgcaaggcagggggcaggagaatgggcccaagtaaatgggactggaggaggagggacataccaggatatttggtttaggggctgagtgcccagtgctccagcttctgtattggcaaaccgaggcatggagtcactgaggacctgtcaggcatggggctggggaggagcttgagagaacagtctctacctctcccttctgtatatacttttggtctacatcccagggcctcagttgcccactctgtaaaatggggatgtccacacctgcctggaggtcctgggattttctgggggtgtttggggggcactagaatgatgattttggttagtgatgacagtgttgccctctgagaaattgcacggttgaggttgagcccctggggttagagggctacgctggggcttgaagggtggcaagaaggtgacctgctgctgtcccgtccctccagtgtacaaggcggatgtggcacgcctggtggccaggccagaccccacagccgagtggaagtctgtggtcatcctggtgcccgtgcgactgggtggcgagactctcaaccccgtgtatgtgccctgcgtgaaggtaggttcagctgaattctaggacacctccacctgggagccctccagacttgtttagtttgtgttagggctgctgtttgtgcagccctcatcacttttttttttttgagatggagtttcgctcttgttgcccaggctggaggtcaataacgtgatctcggctcgctgcaacctccgcctcctgggttcaagcgattttcttgcctcagcctcccaagtagttaggattacaggcatgcgccaccacgaccacctaattttgtacttttagtagagacagggtttcaccattttggtcaggctgatcttgaactcctaacctcaggtcatctgcccacctcggcctcccaaagtgctgggataacaggcgtgagccaccacacgggccatccctttttttttgagacagagtcttgctcttttgcccaggctggagtgcagtggcacagtcttggctcattgcaacctccgcctcccgagttcaagcaattctcctgcctcagtctcccaggtagctgggactacaggcgtgtgccaccacgcccggctaacttttgtatttttagtagagacggggtttcgccatgttggccaggctggttctcaaactcctgacctcaggtgatccacccacctcagcctcccaaagtgctgggattacaggtgtgagccaccacgcccggcccatcccttctttttttatactatgcagcacctgctatgtgtgctccccactgtcccgactgctggggattcagaggggaacagaataggcaggagttctgagtgtgcctgctgggagcagacgttctgatgggaggatgctcagcagtggctatgtaaccaaagtagcatcactgtttggaatgaagccaggcacagtggctcaggcctataatcccagcactttgggaggccgaggcaggaggatcatttgagaccagtctgggcaacatagtgagacccccatctctacacaattttttttgaaaatattcgagtctcactctcttgcccacgctggagtgcagtgacaccgtcttggctcactgcaacctccgcttcccaggttcaagcaaatttcctgcctcagccacccaagtagctgggattacaggtgtatgccaccacgcccggctaatttttgtatttttagcagagatggggttttcccatgttggccaggctggtcttgaactcccgacctcaggtgatccacccacctcggtctcccaaagcgttgggattacaggcatgagccactgcacccagcctctacacaactttaaaaaaacagtaacccaatgaagggcagatgagggtagcagcagagcctagaaaagcgcctctgcagccaccaggcaaatgaggagccagaggagaagtgctccaggcaaaaggaacagcaagacagagaccctgaggctggaaagtcccctatgtatttgcatccgaataaaagccagttttcccagtgacccacagagcccggcactatttgtccacaccaccttcttgatgtcgggatatcccccaccttgacctcatatcctcctcccacactctgctgcagccacaggggcctcctcacctatttcagacactcccacctcagggcctttgcgcttgctgcccctgctgcttggagcactctttcagcagtgatgcatgtggctttttttttttttttttttttgagacggagtcttgctctgtcactcaggctggagtgcagtggcatgatctcagctcactgcaagctccacctcctgggttcatgccattctcctgcctcagcctcccgagtagctgggactacaggcgtccgccaccactcctggctaatttttgtatttttaatggagatggggtttcattgtgttaatcaggatggtctcgatctcctgacctcgtgatcctcccgcttcggcctcccaaagtactgagattatggacatgagccactgcttggctcctgttttaaaatattttttgcgtggggggttttccagtgagaaccagaaaacctgagacaaattctaaaagagctgtaatgtttgacctctttacttaaaatcacaaggctcccttccctcttttattcttttccatatagttatcacctctaacacatgagataaatcatgtaattggctgggcgtggtggcccacgcctgtaatcccagcactttgggaggcaggtggatcacctgaggtcaggagtccaagaccagtctggccaacatggtgaaacctcgtctctactaaaaatacaaaaattagctgggcgtggtggcgggcgcctgtaatcccagctgctcgggaggctgaggcaggagaactgcttgaacccaggagatggaggtttcggtgagccaagatcgtgctactgcactccagcctgtaatcccagcactttaggaggccgagacgggcagatcacctgaggttaggaggagttccagaccagcctggctaacatggtgaaaccccatttttactaaaaatacaaaaaattaacccgggtgtggtggcgggtgcctgtaatcccagctacttgagaagctgaggcaggagaatcgcttgaacttaggaggcggaggttgcggtgagccaattgggccactgcactccaggctgggtgacagagtgagactccgtctcaaaaaaaaaaaaaaaaaaaaaattcatgtaatcatcttccttgttagtctctcacactaggatgtcagctcctgagggcaagggttttgtggtcttgatcactgctgccctccagaggctgggttctcacagaggaggtgtttgccaagcgtttgttgagtggctgcctgacagcacctgcctaccctcctccctgcaggaactcctgcgttgcgagctgtgcctgggcatcatgggtgggaaaccgcgacactcactgtacttcattggctaccaaggtaggcccaccccctcctcactcctcccaccccccaccgcacccccactcacacctgcaccccctgcagatgacttcctgctgtacctggaccctcactactgccagcccactgtggatgtcagccaggccgacttccccctggaggtgagtgggagccccagtgtgtggttggggccatggcgggtgggcagcccagcctctgagccttcctcgtctgtctgccccagtccttccactgcacctcgccccgcaagatggcctttgccaagatggacccaagctgtaccgtgggcttctatgctggagacaggaaggagtttgagacactctgctcagagctgaccagggtgagcaagaggaaagctggagtggggtgaggggggcggttgggcagggctgggggtgaaagaggaacagaggcctcgagtccagcagagctggggtgctgcttccaggctaggggtcctaacctgggaaatgtgaagaatgtccacccctgaaaaggtgggaacgccaaagcccactgttaaggcatcatcccttggaggcagctgtatccaggggctcaagtggtgggaaccctccctgtctcttggccctgctgtccgaccaggactctacccttatgggggcgagagatggccaccagccattctgggcacccaccctgtggtcactggaagggaaacgcaggttttgcagcaaaaatcccaggactgtcagtctttggctgagctgggtcacatgctcatggctgagccaatcactgtggccaggggatggaaggtgctgattggctgctctctcctggagaggtggtcctgagaagcacctactaaataaacctgggctaaggaatatggcttggcactgtttgtggctgaccctgtctccctcttcccgccaggtcctcagctcctcctcagccacagagcggtaccccatgttcaccctggccgagggccatgctcaggaccacagcctggacgacctctgctcccagctcgcccagcccacactccggctccctcgcacagggcggctcctcagggccaaacgccccagctctgaggactttgtgtttttataaagggaggggatgaggggaaagatacaacactatttatttttttatttatgtcatgtcgggtgtgggatcttgagctctggcagtgatgatggtacttcctgttgtcagcccctcaagcccagctgcaaccagtctggggccattcagccagggacagagcccacagagcccatacacctgtctcccaccagcggggccctcctggcagggtagggaaggaggaccccgggcacccccctcagggcctgactcacgtactgtagtttgcactggacgcccgggccctccctgtcccaaagcccccttgggggaactgtggctgctgggggccaataaagctgtgtaacttgatcgtgggtgtggctgggcgcagcgttctgaggggatgtggggtctgggaggtgtctcgaggtgagagctccaagtcacgggaagtttaagtcagcctcagtttccacatccataaaatgggacgacttccttacccacagctacacgtgttttttaatttttttttttttttcaagagacagggtcttgctttgttgcccaggctggagtgcagtggtgcaatcatagctctctgtagcctcaaactcatggccttaagtgatcttccttccccagcctcctgagtagctgggactacaggcatgtgtcaccacattttgtagagatggagtctcgctaagttgcccacgctggtctccaattcctgggctcaagtgatcctttcacctcggcctcccaaagtgctgggattacaggcgtgcctggccacagatgagaggatctctgcagcagatagtacttgtgggtgcgagacctgtccagggcttgatttgaggagaggagcctgaggcccctgcctgctccctggtgctcaggagctgttcttgggcccctgttgtttcctccgctgccggcccagctggcggaagtgcagccgtttggggttgaggccaaaggcctgcagtctctggcggctgaactcgcatccaccaagcatcacagtggggcccagcagccgtgccttcttggccctcctccgcttctggggggctggcttcttgtggggtgatacaggggcttcctcttcctgtgctgggggactctccggccccatcaagctgccatcaagggctggcagctgcctctgtgggccggcttcatctctctgtggcttccctgtggcttccgcaggtgtctctgccctgagggagaaaagtcagggctcagcccaggcctgtcaagatcaggcccattcttgagcacgcatgccccattttacagacagggaaaggaggggcatagtgaagcagccgcacagcgaccgagggcctgcctgggattcagacctgggtttcaggccaaagccagcgcttttctacggaacccaaagactagattgtgaggctgaggattctggtatttgtgcctgggcctgccctaagctagtcacatcaattaactcattttagcctttttcttccttagagacaaggtcttgctgtgtcgcccaggctggagtgcagtcgcgttaccataggtcactgcagcctccaactcctgggctcaagcgatcttctcgcttgagtctcccaaagtgctgggattataggttggagcacacacctggcctcattttagctctaaataaactgtgtgcatctatcacccctgccttctagactgggcgaaagcaatcctaataacagctaagacctatggggcatttaccatatcttaatcactttacgagaattaactcatttcatcctctgcaacttgataaggcagaaccgtctctatctccatcttatgagaaagaggcccagagaggggtagcgacttgcccaaggtcacacaacgttggtgcccatataggattcgaacccaggtctcagagcggggggcgctgcattcccaaagtcatgcaacaagaggttgacggagccaagactcaagcctgggcctgacaggctccccacccacgcttccccagccagcactgcttactcttctcggcagagtgacttgaagacctgccgctttttccatgagttctgggccttctggctgtacgcccgcttgtcccgcagctcctcctgctctgacctgcagacagatgcccctgtgttgggtgctctgggaagtgcccgaggctgcccgccctgccccctgcgcatgtggccccgccgcgccccgccccatcacctgtacatgcaggtcttctttagggagcaccaccggttcagctccttatcgtcagcagcgaggatctgcgtgggaagggagagtggggacctgctgtgatattgcccaggcggggccttccctgagcctaagtcatgtcattagtcaaaacggtaatgccgctaccacccagcagggttgccatgatggccagagacagctgatctctacagaggccaatgatttttgtagaggtcagcagatggggtaactgaggctcagagaacggatccttgccctaggccagatggctgggaagttggctgaattgattccagtttgagcctcagggcccttgagctgtcacccatacccggccatccccaaagcctcagaacgggcaggggtcgctgccaaccaccaggcttcctaattacatatgaaactgtcattcccagcctctaggcctgtttccaaacctactggaaggccatcagaaagaggaagtgattgaatgccgatggtataagcttagtacacatcggctatttttactgaccatgaaaatggtcgtgcaccttcagccgtcatcagtcaggcatagtaggtacccacagcctgccaggtgccacacactttggtctcatttctgttccttccatagtcaccaaagttggggtgctatcaattattgtctcactttacagatggggagttgaggcacagataggggaatcatttgtccaaagactcagctggtgagcagccaagccagggcttgaacccacctaggccccctggttccagaggacaccaagtcttttgttgagacagggtctcactatgtcacccaggctggagtgcagtggcaggctcacagctcacagcagcctcaacctcctggactcaagcaaccctcctacctcagcctcccaagtagctaggactagatctccctatgttgctcaggttagtctcagaactactgggctcaagtgatcctcctgcttcagcctcccagagtactgggattacaggtgtgagccagtgtgaccagccctgctaccaagtcttaccagccagactgctgctaatacatactgacaggaataaaataatattggctgggcctggtggctcacacctgtaatcccagcactttgggaggctgaggcaggcagatcacatgaggccaggaatttgggatcagcctggccaatatggtaaaacttatctctactaaaaatacaaaaattaattgggcatgatggcacatgcctgtagttccagctacttgggaggctaaggcaggagaatcatttgaacctgggaggcggagtttgcagtgagctgagtttgcaccaccgcatgccggcctgggtgacagagcaagacactgtcccaatcaaccaatcaaaaaataaacaaaaataaaaagtaatattggctgggtgtggtggctcacacgcagaatcccagcactttgggaggccaaagcaggaagcttgtttaggcccagggagttcgagaccagcctgcacaacacagtaaaacatcatctgtacaaaaaatatttttaattaaaaaaaattaattgggcatggtggcacatgcctgtagtcccagctacttgggaggctgaggtaggaggatcaattgagcccaggaggttggcaccactgcactccagcctgggtgacagagcgagactatgtctcaaaaaaaagaagtaatatttacggggcgtgccataggtgaggcactgttttaagcccccaccttgtagaaggtagtaatattacctttgaggtgaggtaatgttattagcactgtcattaggactattagcatttctttttttttttttttggcgctctgtcacctaggctggagtgcagtggtgcaatctcggctcattgcaacctctgcctcctgggttcaagcgattctcctgcctcagcctcccaagtagctgggactacaggcgcctgccaccatgcctggctaatttttttgtatttttagtagagacggagtttcaccacgttggccaggctggtctcgaactcctgacctcaggtgatccacttgcctcggtctcccaaagtgctgcgattacaggcatgagccactgcgcccaaccgaatattatcattttcaagatgaagaaacagcctgccatgttgtggcatttctgagcaacagagattgggactcagggccagctttctaccccttcggcatacctggtgccccctgcagtgtccctgcctgcccggggcccctacctcctcagtgctgaggccaaagtcacagggcaccactgtgcggtacttgaagcgacagggcaggtcgtcgatgatgtcctcgtagtccagccggtaatactcatccaggtactcctcgaacgtcttgtcccctgctcgagacagagccaggctgctgggctatgccaggccccgcggtgccccctgcctacccacggcctgcccacctgggcctcaccgggttcaaacacgggcttctcctgccccacggccgcggcgaagggcgacttgcgcttcttcttgcccgtcaagggggcctcgcgctttttcttcctcggctggctggggtcgtagtcggcgtccatctgccaggacgcacaggtcagatcccaccagccccccgtcagggcccctgggactccctcaacccgtgatacctacgttgaagttggggtcctcacagtgcagctcctgctggctccagtctccctcctgctcaggcccgtcccacgtgtcccagttccagtcgtctggatgcagggagaacagacaggtggggccagggtgggaccttgggcttcagtcccagtccccagtccccaatccccagcccagtgccccagctgatctcaccttcaagcccttcttcttcctcaaattgtggcttctcctcctccacggccccgtagtactcgtccccaaagcacttctgcagggtcagggctggcggttaccagagcccactcgagacataggagctgagccccctacgatgccgccaatgaccccctccttggcaactttactcctacagctagggctccctacagccctcccagcacctagctcctgaggtgggaggccctgcatgtccaggatcctccgccaactcccctgctgtctaccctgtgatgtactggccgccattcagttccacatatccacagttcttcgccgtcctacccaccttcgcccctgtggtgcccaccacctggtgcactactcaggccccaggtcttttttttttttgaaacagaatttcgctcttgttgcccaagcaggagtgcaatggcactatctcggctcactgcaacccttgcctcccggtttcaagcgattctcctgcctcagcctccggaatagctgggattacaggcatgtgccaccacgcccggctaagatcttttttttttgagacagcgtctcacccagtagcccatgctggagtacaatggcgagatcttggctcactacaacctccacctcccgggttcaagcgattccctgcctcagcctcccgagtagctaggattagaggtgcacgccactacaccctggctaattttttgtatctttagtagagatggggattctccatgttggccaggatggtctcaatctcctgacctcgtgatccgcctgcctcggcctcccaaagtgctgggattacaggtgtgagccactgcacccggccaggtctttttttttttttaaaacagaggctccctctgtcgcccaggctggaatgcagtggcatgatctcggcttactgcaacctctgcctcccgggttcaagcaattctcctgcctcagcctctcaagtagctgagattacaagcatacaccaccacacctggctaatttttgtatttttagtagagatgaggttttaccatgttggccaggctgatctcgaactcctgacctcaggtgatctgcctgccttagcctcccaaagtgctgggattacaggcgtgagccaccgtggccagtgagagccatgtttgtgtgaactcagcgtcatgttgggccgggatgagggccgcacctgcatgagctggtcgtgctgggcagggtcgaagtcgtcttcaaggtccccctcctcgaggcccagcatctcgttgcctgttactttccgcagcttctccagcttggccagaatctccttcctcttcaggttcttcagctgcttgagctcttcctgcttctttgctttctcctgcaggcccaggcagagagggggagggcatgggctttcctccagggctggggggtcctccccagctcaccccccacactcaccctcttctttcgctcccgagtctcttccctcttctcctttctgcgctcatccttacggcgcacggaggacgcgatgctgcgtgggtaggtcttgacctaggcgcaatcagaaaagcccacaagggccgcagagatgatgtggggttccctgggcctgaaccctgggggctgagtcctccccagccccagccacacaccgatgctgagtccggctcctcgaaacggaaattgtacttctgttcaaagtcctcctgtttcttcagaaacagctccccttcgtctgaggagtcgtccacagccagctggactgggggaccgtggaccctgaggggcaagatgtggtgatgccagggggccagccaagtgaggtcgagcccccctttcctgcacgcctgggtacgaagcgtatgaactcatttaatcctcacaagaaccctacaaggtgcacgctgctattgtcctcattttacagatggggaaactgaggcatgaaagtcttgaagccgaaccaggatttgaggcagtgccacctggctccagagcctatactctgtggctctgccttacagaagactaactctgccaccatctgtgaaaaaaatacacacatggtgccctctgcctcctggccagtgccgcctgggaatacttcatgaagcgcacccaaaatctaggtcctggggagatgcagtggctcacccctcctcttcctccatttcctcttcatcttcctcctcctcttcctcctcctcatagcgtttgttgaggatgtaatcccgcaggaaccgctccccttcatccaactcagggtcgttccagtattccttgagatgcgtctgggggtgacaggagacaggactctggtcaatggaggacagggaaggagggcaggcatgctcaccacatggacctcacagccagcctctggagtaggtgacattagccccattttggtttcttatttttatttcgagacagggtcttactctgccatccaggtgacagtacagtcgtgtgatcatagctcactgcagacccaacctcccgggctcacaagatcctcccaccttagcctcccaagtatttgagactacaggtgcatgccaccatgcctggctaattttttcatttttttgtagagccattttgctatgttgcccaggccagtctcaaactcctggcctcaagcaatcctcctgccttgaccacccaaagcactgggattacaggtgtgaaccacggcacccagcctatccccatttaaagagatgtaggagctgaggcccagagatgtacatatcccatcttcagagggttactttctgtaaataggttggatggacgcggaacacgcggtctactccatcagcgaccatgcgtgagaactcaccagttccttcagggaatctgggttccgaatctctttctgtcccttcagccactcgatgtagtcggcctcctcctgggcctgggggaaagctagcactgagcatccgcagatgcccagccacccgccaccctgtcccccagcagtccagtcaggccccagtacccaccttctcctgcctggttttggcacgtttctgcagcaaactggagccgccctccccagcgccgtcctcgtcctcactgtcctccacaaatgcccggaagctgcccacgagagaaaacaagcctcaggacaggcaggctggcccctgtctgctgccccagtatttattttattttgtagagctggggtctcactatgttgcccaggctgatcttgaactcctgggctcaagtgatcctccctcctctgcccaccaaagccctgagattacaggcatgagccacctcacctggctggctgccccaagattaaccccatttactaagccctgagctctcctctcaacaagctcagagcagtgctgtgatgttattaaccccgtttaactgatgaggaaactgaagcacatagaaagtgacagagctcaatttgaacccgtgcctatccaacccccgagcctcaactttcctccattgggccattcccgcccacccagcctcacctttccttgagctgtttctgttcctccacataactttgcgacgatgtctcctgcagagagggccataggtctcaggccagccccaggcccctcagccccccgacccagccttcaccccacccacctggagtctgtgattggaagtctccccgtctgagttctcctcatcaacatatttgctgtaaaggaaaagtggggtcttcagaatatatcttccagggcccgcctgtccccatgcccatgcggagcagctattccaagcaacagctggcgggggtcatcggagggctatggaatcactgagactcctgctctcagggctatctgcgattctggtgagtttccagcgttttttttttttttttcttttccaatcatgggtgacagcatttcttttttggagccagggtctcgctctatccctcaggctggagggcagtggcatgatctcggaaaactgcaacctccacctcccagattcaagcgattctcctgcctcagcctccccacgtagctgggactacaggcgcccaccaccacatctggctaatttttgtatttttagtagagacggggtttcaccatgttggccagggtggtctcaaactcttgacctcaggtgatctgcccgcctcagcctcccaaggtgctggtattacaggcatgagccaccatgcccggccttttttctttttgagacagggtcttattctgttgcccaggctggagtgcagtggcctgatcatagctcactgcagcctccatctcctggctcaatcctcctgcctcagcctcctgagtagctgggactacaggtacacatcatcatgcccagctaatttttaatttttttgtagaggcggggtatgttgcccagcctggtctcaaacttctgtcctcaagcgatcctattgcctcagcctaccaaagtgctgggattatgggcatgagccaccatgcccggcccaggctgccagcttttttccctctcctgcccctaagacccccatagacctgacagggctgggaaccagggggtggggatgtaggccttctccataccctgccttctccaagataaccttcctctcgtagtccttcaggtacatgggccgcactttcttctgcttctccaaggcttctgggtcctcctcactgtctgatgacgatgctgttaacccaccaaagacacctgccatcacccacaacccccttctttgccgtggcagagaatcccacagggcagggccagggttagacagaggattcaaatcccaaatccaccaattcccagctgtccaagagtattgtgcttgtcaccatctggtggggttggggtcattcagtcagtaattcctgctttgattattattattgttgttattatttatttacttatttttttttgaggtggagtctcattctgttgcccaggctggagtgcaatggcatgatctcggctcactgcaacctctgcctcccgggttcaagctgttctcatgtctcagcctcccaagcagctgggattacaggtgcccaccaccgcgcccggctaatttttatatttttagtagagatggggtttctccatgttggtcaggttggtctcgaactcctgacctcaggtgatttgcctgcatcggcctcccaaagtgctgagattacaggcgtgagccaccgcacccggccattattattatttttttgagacagagtctcactccgttgcccagtgcatggcgtgacttggcttactgcaacctccgcctcccaggttcaagcgattcccctgcctcagcctcctgagtagctgggattacgggtgtgcaccaccacgcccagctaatttttgttatttttagtagagatggggtttcaccatgttggccaggctggtctcgaactcctgacctcaagtgatcctcccgcctcaacctcccaaagtgctaggattacaggcatgagccaccatgcccagcctgattaattattataattaatttttttgagagttggagtcttactcttgctcaggctggagtgcagtgtcaacatcctagcccacagctcactgcagccttgaactcatgggcttaagcaatcctcccacttcagcctcccaaatacctgggactataagcgcacaccagcatgctcagctgagttctgaatcttttgtagagatggggtcttgccgccaggcacagtggctcacgcctgtaatcctagcactttgggaggccaaggcggatggattacctgaggtcaggagttcgagaccagcctggctaacatggtgaaaccccatctctactaaaaataacaaaaaaatagctgggcgtggtggcacgcacctgtaatcccagctactccggaggctgaggcaggagaatcggttgaaccggggaggcggaggttgcagtgagcccagatcatgccattgcactccagcttgggcaacaagagcaaaactccgtctcaaaaaaaaaaaaagaaaaaagaaagaaaggctggctgggcgcagtggctcacgcctgtaatcccagcactttgggaggccagggtgggcggatcacctgaagttgggagttcgagaccagcctggccaacatggagaaaccctgtctctactaaaaatcccaaattagctgggcgtggtggcgcgtgcctgtaattccagctactcaggaggctgaggcaggagaatcgcttgaacctgggagacggaggttgcagtgagctgagatcgtcccattgcaacccagcctgggcaacaagagtgaaactccatttcaaaaaaaaaaaaagagaaatggggtcttgctatgttggccaaactggtctcaaactcctggcctcaattgaccctcccacctcagcctcccaaagtgctgggattagatgcttgaaccacctgcccagcctggtggagttggaatcattcagtcagcaattcccaccttgaatagtgccaaggacacagtcattaactccaccaccaggtaataacctaggctctgctaaggacttgtgacttgtgaagcaattcattcaatagtcaaaacagatgaactgtgtaaactgggtaaatcccaatctatccttaaaacagccctgaggggagatgctaccgttagatatactttacagacaggaaaagaggctcagagaagtcaagtcacttctctgaatccacagtcaggaaaggaccccggattctgctccagaggaaggagaggtttagacaggagtggccccggacctgttctgttatagaaggtggcatctttctgataaatgcgggggtccttcttcttcaacaaggagagcgttttgtaaaagtcccgctcctgctggggatcaaattcctagggcaggaaaagggttggggatagatttcagaagggagataataagagccctggcgccagcaggtgagctcagcgtagggattaggatggaggggggtggatctggctggggaggtcaaacaggtggtcaaacagcaggagggagaggggccctcttggggtgggcaggggcaggccacaggtaggtacaggatatgggtagaggaaggtgaggggcaaggagaaggtaattcctggggaagacaaagacttgacaaggggcaggtgggctgagggcacaagagagacagcggggaggggctgggccaggccgcacagtggggccaggatcagggctgatgtgagaagttgggcgccccacgtggcgcaaggagtacactaaaaaatggctagactcttgaggatgaaagaggaaagggggggttcttgggggacagagtcgccccacacatcagagtgggcaggtggggatcgtggcaggggagagaaaataacggggatttggctcccctggggagagggggggcactgtctgtccctcatgggatggggagcggaggatgggacgctcccgcagggcgctctggggttgggggttcccccccgtctacatcggggtcggggtgcagaggggggcttggacgcctccgcacgtccaggacggggcggggacgcgcaccacgcgctcgtcgcttgagtccgactcggagctggagtcgctgctgctgtctcggtccccgtagcgatccttcactgcgggacacagacgggatgcccccccccaggtcagccggcggggccactcgactccccacttcccaaccggccggcgcgcgcaggctcccgcgcgcatgcgccccgcactcacgccgctgcagttcctcgcgctcccggtagcggttgtaccgcgcggcaaacgccgcgttcacccgcagctgcgacgacccgcgcggttccggcatggcggttctgtggcccattgcgcacgcgcattgaggaagccctggacggggcggggccgccctcagtcccgcccgcatccacttgtaaacgaggcgtaccgctgctaaccccgcccctggcttttccgggatccctttcgcctcatcaccgcagtcaccgcccacggctacgcccctgcggggaaggccgcggccaccgcccacccgccccaccccctgtgctccgggcacccagctgacatctgggggccctttctccactcgcggtttcctgcttcccttccgttccgacagcgaaaaccgctgccccacccagctcactcaccctggcgccctgggaattactattctctcccctcacccaccacatccacgatccgcgacccccgtcctcatccccatcaacatccgggatgtgtaactctccatcccagactcaaaaatcagaagccacccgtgctgtgatcatgcacaagtcttaatttaatgggtaaaaacattaaattattacaacattttttccaataaagcataataaatagaatccatttcttttaaaacgctgtacaagagactggaaaacaagcttccaacagaatatgaataactcataactcattctaccttcttattgatttgggacgctccccccaccccccatgcctgaagcaacgtgcacacttcaggtctctgagcacagccggccaaggccaccagcttctaggctccctggaggtcatgacttcactcttaaatgctctgcccttgggtctcgtctgaggccccagcagcctgaggcgcagaagaaactgaaccgtttaggtggctgtggcctgcaggagcccttctctgtccaacacaccaaaaggagtgagaaaaacaaatgagaaacgtcccccaaacactcacacccccaaaaccaacacctataagccacaaactgtgctcctcccctactgcagcagtgggcaggagaaacaagaagagaaagtgtttcttcccctctcttctgatacataaccccacggggttctcttgctggagagggtgaccccagatcacagcggggccaccatgtggccctgcaggatgtccacgaggtcctgagcccctctctgcagtgccagctccaagggtgtgagacccctggcgtccctgcgatggagatcagattcagctgccagaaagctgaccacagcagtgtgaccctcttgaactgccagatggattggaagtgccccggtgccatcaggcacgttgacatcagccccgtgctccactaggaccttcagggtgtccaggaatccagtgcgggctgcgtcatggactggactggtaccggaggtgtcctggacattggggctggcaccttgcttcagcagctccagggcgatggcggtgctgccaaacatcatgacctgtgtgagggacagaggatcaggaggtcctcaagggaggaggttccacaaaaggggtcactggaaagagaagggtcatccagaaagaggcatctcccagaaacaggaaatgctagaggaggggtcctctagtgaacggagaagctgcataagcccccaggaaagttcttctgggaatagggaccccccccaaaagctggtcactcccttaagaatgagaccccccaacccagagaacagccccccatggaaactttcaaggaacctaagactctcccccaagggaccaaagacgcccccagatatgggcaatcaccaggaaacagaaaatcccctccaggaaatgggcccccagagatggagaactacccccaaagaattgatagtcctcataagggaaaaaagatgtcaaaggaaagcgaaccccttctccaggaaatagcctcctcctacataatggtgatgtcacctcagagtacctgagagctcctttcaagaagcgggattccaaaagtaataataaaagagaaacgagacttccctgtaaaatgtctcccagggaatatagggatgtcttgcaatctgacattgttcctccattggggcccccatactatatcaaggatccgcataacctttaggaatgaagaccccacccccaagtaaccagatttgtctcagagagccccctacaaaatgaggaacccctagagacaggacctctccttccagagatcggatctccccatagaagccccaagaaacgtgagccgtccccatggaaacggcatccaaaggagctgaacccgcacccacggaataagaacctccccagggaaagtgaatccccggcactcagagaaccaggaatcctcccagagaagatgctaaaaagctctcccctccccccacaacctagcctcacccaccacccaccttcgaagggggactgtgggggaacaatgaaagcctagagaagaaggaccggttcccagtgggtcaccaccagggccaggagaccagagaggagctctggggtctcgatcctcatcccgcttagccgccccgccccaacctggaccggcccggcctcacctgcagcgccgtcttgccgaagcggttgagggcgtcgggatgcaccagctcccggtgcagaaggcggcgcacctcctgcacgtcgccccgggccgccgccccactcagccggtcgccggcgcgaacctcctccagcagcatgtcgacactggcggcctgcaaagccccccgccccgccccagcccggcgctgtcagcgcggagcagccggcgggcgctggcccgaacagccctcccggggcgcggccgcggtgcacccggctgcgctgctctcccgtcccggctccccagcccgagaccccggccctcccggcgggctcctccccctgtcagccggaggacggcgaggggctgggagccgggcccaaccctcggccgcccgcggggccctgcccggcgcccgccccttgggggccgggtctccccctaactcaccctccctcctcctcgccgggcggggtctgctctgagcctgcgccgccgccgccgctgaggcagccgccagggggcggagccaacgtgctcccggccacgccccgaacgcaactgatttgttttcttacaaactcgctactgtgtagcggcaccgcgttgcccggcgcgcgaccttacggcgttccgcccacagggcctgcataaccagtggctgcgcgtcgccggggaaacttcgggctcggcgtgaaacgcgtcgctcctgattggtcagagtgtggcaaccggtggaccgccggcaatggcggggttttcggttttcaaatgaacccggcaggcgggaaagaaggctggtttaactgacccagggagaaaggtcaggggcagggtcgcgcgggctgctctgggacctcggcgcctcctgagggaagggaggcagggctggagccacccaatccgaggttccactactaatagacattcattggcccttactacgagctgggcgctttatttcattcatttattcattcactgtgtgcagggagcgtcctgggagctggacgcgcacattcaaacaaccaaataatattagatagtgtcaagcaccgtgaagaaagggaaacggagagacggagtggatgaggaagggatcaccctgccgggctcagactgagccagcaggaaaggagcctgcagctgccacgtgggaaggcctgagaggacatagtcgcagccagacagggactcagaggtcttcgttcaaatatttacttagcacctcctagaggggcccgagtggagagcacgccagtcggcccctgctgcagggacacctatggtctggggccagagacaatagttaatttttatttatatatgtatttatttttgagtcagggtctcactcctgtcacccgggccggcgtgcagtggcgcgatcacagctcactgcagcctcgacttcccgggctcaagtgatcctcctgcctcagcctcccgagtagctgggactacagggcgcaccaccacgcccggctaatttgtgtttttagtagatatgaggtttcactatgttgcccaggctggtgttttttgtttgttatttgtgtttggcttttaaatacagatttttttttttatgttggggttcttgctttgttgcccaggctggtcccgaattcctgggctcaacggatccttctgccttggcctccaaaagtgctgggattacaggcgtgagctcctgctctccgccaatagttaaatctttttagagtggtagaggactgaccagatgagccattgaaacggaaaggcaaaaagccgggcgcggtggctcacacctgtaatcccagcactctgggaggctgaggtgggcggatcacgaggtcaggagttcaagaccagcctgaccaacatggtgaaaccccgtctctaccaaaaatataaaaaattagccgggcgaggtggcgggcgcctgtagtcccagctactcgggaggctgaggcaggagaatggcgtgaaccccagggggcggagcctgcagtgagccgagattgcgccactgcactccagcctgggcgacagcgagactccgtctcaaaaaaaaaaaaaaaaaaaaaaaaattagctgcgcctggtggcacgcacctgtaatcccagctactcaggaggctgagacaggagaatcgcttgaacccaggaggcggaggtcgcaggagccgagatcgcgccattgtactccagcctgggcaacagagtgagactctgtctcaaaaaaaaaaaaaaaagaaaagaaaagaaaagaaaaagaaacgcaaaggcagggagggcctccctgaagaggtgacatttgatttgagacctaaaggtgagggagggagacttgtggttatatggggaaaagcacaccagctgggaggcacagcagatgctaaggcccagaggtgagagcgtgcctggtgtggtacagagcaggggagagcaggtaggtggggtatcaggatggcaattgtgcaaatcaagccatggcttttttatttatttatttattttaatttttttttaattttttttttgagacggagtctcactcgcccaggccagagtgcagtggcgctatcgcggctcactgcaagccccgcctcccgggttcacgccattctcctgcctcagcctcccgagtagctgggactacaggcgcccgccaccgtgcccggcctttttttttttttttttttttttttgagacagagtcttgctctgtcgcccacgcccgaccaggccatggctttaataagataggaatgccgagcgaagtggctcacacctgtaattccaacattttgggaagctgaggcgggtggatcacctgaggtggggagttcgagaccagactagccaacatggtgaaatcccatctctattaaaaaatacaggccgggcgcagtggctcacgcctgtaatcccagcattttgggaggccgtggcgggcggatcacgaggtcaggagattgagaccatcctggctaatacggtgaaacaccgtctctactaaaaatacaaaaaattagccaggcgtggtggcgggcgcctgtagtcccagctacttgggaggctgaggcaggagaatggtatgaacccgggaggcggagcttgcagtgagccgagatcacgccactgcactccagcctgggcgacagagcaagactcttgtctcaaaaaaaaaaaaaaattaagccaggcgcggtggctcacgccggtaatcctagcactttgggaggccaaggcgggcggataatgaggtcaggagtttgagaccagcctgaccaacatggtgaaaccccgtctctactaaaaataacaataattagtggggcatggtggcgcacgcctgtaatcccagctactcagcaggctgaggcaggagaatcgcttgaacctgggaggtggaggttgcagtgagccgaaatcgcgccactgcactccagcctgggcgacagagcgagactccgtctcaaaaaaacaaaaacaaaaacaaaaattaagccaggcgcagtggctcatgcctgtaatcccagcactttgggaagccgaggcgggcagatcatgaggtcaggagttcgagaccagcctggccaacatggtgaaaccggtctctactaaaaatacaaaaattagctaggtgtggtgatgggcgcctgtaatcccagctactcgggaggctgaggcagaagaatcgcttgaacccgggaggcggaggctgcagtgagccgagatcgcaccactgcactactccagccttggcgacagactgagactccgtctcaaacaaaacaaacaaacaaacagacaaaaaaagccaggcgtgatggtgggcgactacgactataatcccagctactcgggaggctgaggcaggagaattgcctgaacctgggaggcggaggttgcagtgagccgagatcgcgacactgcactccagcctgggctacagtgagactgtctcaaaaaaaaaaaaagaaaaaagaaaaaaggaaaaaagaagcgatgctaacacgcgccctctagcggctactgggggaacagaccgtggaggtgggaagcaaaggcaacagcagaggaccagggccatgacccgggactgaggaatggactgacacgtgttacccactcccattgcagcacttcagtaatgtccccaaacaagcacataggcagcggctagattcatctttttaatgacatcctaaaattcagaggaggggccagcgggacctctgggctcagcggctgtgaaggagggacccgcaacacccgctaaggcaggtaattgcaagaaggcactcgcgaggaggacttcaagcccctcttctatttcttcatataaaatcagggggatggggaaagctccaagggcgagggaagcagagagagtttctctcccagcctatggaataaggaagaggtgaggaaggggcgggtgctgggagcaagaaactgccaagtccaggacctgccctcacacagacacacacagcccgcacctgccctccctctaaaatctgcatccggggctgtaaggaagccccgtgttcaagcccccatctcttctcccttctagctggtacgaagttggtaatctgcagagaaagaatgaggaggggccatctcagaaatggggagaggggggccgggcacggtgactcacgcttataatcccagcactttgggaggtcgaggcaggtggatcacttgaggtcaggggttcgagaccagcctggccaacatggtgaaaccccatgtctattaaaaatacaaaaattagctgggtatgatggtgcacacctgtaatcccagctactagggaggctgaggcagaagaattgcttgaacccaggaggtggaggttgcagtgagctgagattgcgccactgcactccagcctgggcgacagagtgagattccatctcaaaaaagaaaagaaatggggaggggtgaaggaagagggacagcctcccacagcccctcaattcatcccctatcccagcactcatgatcaacaaggctaagaatggggctaaacacaggtactgtaaccatagaaacaaggcagtttccaggcagcagatggaggtgctatatgttcagccccttctccaaactcgcgaccaccctagaactgacgctgacaactgtccctgcttttttttcctttttttttttttttttttttgagccagggtctcactcttgcccaggatggagtgcagtggtgcaatcacagctcactacagcctcgacctcctgggctcaggcgatcctcccacctcagcctcctgagttgctgggactacaggtgtgcacatcacacctggctaatttttatattttttgtagtgaaggggttttgctgtgttgccaaggctggtctggaactcctgagctcaagcggtcctcccacctcagcctcccaaagtgctggaattacagatgtgagccaccacacccagccaactgcccccattttaaagacgtgcaaaccaaggcccagggtgccatgacaagaaggggcagtttgctttctttttcattttttgagacagggtttctgtcgaccaggcaggagtgcagtggcacgatctcagctcactgcaacctccacctcccgggttcaagcaattctgcctcagcttcctgagtagcttggattataggcatacaccaccacacccggctaatttttgtatttttagtagaaacagggtttcaccatgttggccaggttggtctcgaactcccggcctcaagagatccacccgccttggcctcccaaagtgctaggattacacacctgaaccatcacacctgacccttgttggttttctgagccagaatgtggtgaaagcctcgagtccctacccactgcctttccctcaccccattgtccccaggagctgggctgccttaccgccactctgggtgatgtagcgaacccagggcagggcctggtaaccacttttctcaatgatcttcatgtatcggacctggaagggaatgaaaagaggtggtccaggattgcaggagggaggaggccagggccagggagaaagagacggcttaggccaagcggctatgtggcacaggctgggatcgatgaggggatatcacatggtcttagggggatgaggtggcacaggcaacggaatggtgaatggctttggaggtggagaagggacagaagtgaacaagccggtggggaacaaggtggcacaggccgggggagagggagcacaggctgtgggcagataaaggtaacattgctctgggaaagaccaggcagccttcagaggagtgttgacacaggccaggggactgaggtgactcgagccaagggacaggagagaggggaacccaccgaagtcaaggggaggatcctccctgcctgcttctctcacctggatcccagagacggtgaagtaggggatctcaaacttgaccccgatggggggccggccctccacctcttccttttccacactggggaggccaaagtgggctcgcatcaagtactccttgcccccctgagggaacatgggggcatcaggtacacgagggtccgcctaccctcccgagaccttcctttcagcaacccctggagtcagatctgctcacagcccatttcacagacaggaaaataaaggctccttagcctgggcaacatattgagataccatgtctacaaaaagtttaaaaattagctgggtgcggtggaacatgcctgcagtttcagctacttgggaggctgaggcaggaagatcccttgagtctgggagtttgaggctgcagtgagccatgatctcaccactgcaccccaacctgggtgacagagactcaccagggaagattctgactgcaaaacccaatcagggtttttttctttttttaactaccatgtcctgttttacaggcactgatgatccacctctcccaagatcatggggacaaaccaaaacctctagtagccaagggatgtgggtcacctcatcctgcccatttcacagacaggcaaactgagcctccttaagtggaaatgggtttcccaaacccacccagctcagcaaagcaatagtgaggaaggtgaacccagggctggtttcctcaagacattggcagggggatatttaaatccacacacttcccgtcatggaagtttacacgtctgtgaaatagactggcctggtttcaagcttgatcacttgcatacatacgtacctctctgatttacttgtatttcttttttctttttttttctttttttttctttttttttttttttgagatggagtcttactctgtcgcccaggctggagtgtagtggtgcggtcttggctcactgcaagctccgcctcccaggttcacgccattctcctgcctcagcctcccggtagctgggactacaggcgcccgccaccacgcccagctaattttttttttttttgtatttttagtagagacggggtttcacagtgttagccaggatggtctcgatctcctgacctcgtaatctgcccgcctcagcctcccaaagtgctgggaattacaggcgtgagccactgcgcctggccttgtatttcttttttctaagtttttttttttttcttgagacagagtttcactctgtcacccaggctggagtgcggtggcgtgatctcaactcactgcaacctccgcctcccgggttcaagtgattctcctgcctcagcctcctgagtagctggtactacaggcgcacacccccatgcccggctaattttttttttttttttttttttgaaatggagtctcgctctgtcacccaggctggagtgcagtggcgtgatctctgctcactgcaagctccacctcccgagttcaggccattctcctgcctcagcctcccaaatagctgggactacaggcgcctgcaaccacgcccggctaattttttgtatttttagtagagatggggtttcaccatgttagccaggatggtctcgatctcctgacctcgtgatccgcccacctcggcctcccaaagtgctgggattacaggcgtgagccaccgtgccctgccctaatttttgtatttttagtagagacgggttttcaccatgttggccaggctggtcttgaacttctgacctcaggtgatctgcccgcttcagcctcccaaagtgctgggattacaggtatgagccaccatgtctggccttttaatcttttttttttttttttgagacggagtctcgttctgttgcccaggctggagtgtgcagtggcacaatctcagctcactgcaacctctgcctcccgggttcaagcaattctcctgcctcagtgtcccgagtggctgggattacaggcatgcgccaccacacccagctaatttttgtacttttactagagacggatgttagccgtctctatgttagccaggctgggatttcaggcgtgagccactgcgcccagctcctcttaatatttttatagaggcagggtctcactgtgttccccaggctggtctccagctcctgggttcaagcgatctgcccgtgtcagcctctcaaagtactggcattccagtcatgagccatcacacctgactgggtctctgatttgttctctgccttgttctcatggctcctgggcagcccccacactactccagtcccctccacccccagatcccccgccagtccctggtacttaccgggaaagacttaatactccaaatcacgacgtttctctccggcacatacttggcgctgcccacactggtcttgaatctgggggagtcggcatcgctgggtacaggcacagatatctccacaccgttggccactgactgtttcttaaactgccccttggcctgtcaggggagcgagcatggggcacgaagaattcgcttgctcatccttcaaatatttaccaagcccttttttttttttttttttttttttttttgagacggagtctcactctgtcgcccaggctggagtgcagtggcgcgatctcggctggctgtaagctccgcctcccaggttcacgccattctcctacctcagcctcctgagcagctgggactacaggcacccgccagcacgcccagctaattttttttgtattcttagtagagacggggtttcagcatgttagccaggatgttctcgatctcctgacctcgtgatccgcccaccccggcctctcaaagtgctgggattacaggcgtgagccaccatgcttggcctttttttttttttttttttttagacggagtctctctctgtcacccaggctggagtgcagtggcacaatctccgctcacggcaacctccgcctcctgggttcaagcaattctcctgcctcagcctcccaagtaggtgggattacaggcatgtgccaccacgccctgctaattttgtatttttagtagagacagcgtttctccatgttggtcaggctggtctggaacgcctgacctcaggtgatcctactgcctccgcctcccaacatgctgggattacaggtatgaaccactgcacccagcctgaaggggtcattttgaatcaggcaaaggtgtatggtgctgtccacatggaaggcaccaagaacagggcttctcgagcctcatgggtgtgggcctgagttctaacagttgttggctgtgtatctgcaggcaaatgccttaacttctgtgtgcctcagtttcctcatctgtaaaatggacaggataagggtccccaccttaggattgtggaggcctgggctgagagggcatatgaaaggcttgttgaaaaaagccgggggtggtgggccacacctgtaatcccagcacttggggagatggaggcaggcgtggcggcaggagcctgtaatcccagctgctcgggaggctgaggtaggagaatggcatgaacccaggaggcagaggttgcggtgagctgagatcacaccactgcactccagcccgagtgacagagggagactctttctcaaaaaacaaacgaacaaacaaacaaaaaaacccttcagtccatcacaggagagttattattttatttgataacagattttttttttcttttttctttttggagatggggtctagctctgtcatccaggctagagtccttgtctcactacaacctcctcctcctggactcaagcaatcctcccacctcagcctcccaactaactggcactacaggcactcaccactttaccaggctaatttttgtattttttgtagaaacagggtttcgccctgttgcccaggctggtctcaaagtcctgggcttaagtgatctaaccaccccggcctcccaaagtgctgggattacaggtgtgagccaccgcacccacccgagatcatgcattgttaataagcattcccccaaggcccaccttgaccatgatctccacgcggctgtgggagaacttctcaatgacagactcaatccagatcagtggcttgacctgtgggaagaagaaggggagagttcttggagactccatgttgactctcttctttttttttttttttttttctttctttgagacagagtctcgcttcttcgcccaggctgaagtgccatggcgtgatcttggctcactgcaacctgcacctcctggactaaagcaattctcggccgggagcggtggctcacgcctgtaatcccagcactttgggaggccaaggtgggcggatcacgaggtcaggagatcgagaccatcctggctaacacggcgaaaccccgtctctactaaaaatgcaaaaaattagctggacacggtggcatgcgcctatagtcccagctactcgggacgctgaggcaggagaatggcgtgaacctgggaggcggagcttgcagtgagccgagatagcgctactgcactccagcctgggtgaaagagccagactccgtctcaaaaaaataataataataaaaattaaaaaaaacaaataaagcaattctcctgcctcagcctccccagtacctgggattacagcatgtgccaccatgcccagctaatttttgtatttttagtagagacagggcttcaccctgttggccaggctggtctcgaactcctgtcctcaagtgatccacccgactcagcctccaaaattgttgggattacaggcgtgagccactgcgctgggcccagggtcgctcttcagcctaccccaacctactccacccagatggggctggaccctgcctcacctgggtgctgaggcggtatgacatgagctcaaagtcaccatcaggcgggatgaaggagatggtgcggtcgttgtcaaagcgagagagccgcacgcactggtggaattttacatcctccagctctactgatttgttcttgctgcctgaaactcagagtggagagtggagagtgaccctgggaaccaggaaaggatccctatccccacctttcctgccgaccactgtcacctatttcacatatggggaaactggggcccagagagaatgagcaaaaactggcacagtagagctggaatctgaacctagtatctgtacaggatctggcttggtttttttttttttttttttttttttgagacagagtttcactcttgttgcccagactggagtgcgatggcacgtcttggctcaccgcaacctccacctcccgagttcaagccattctcctgcctcagcctactgagtagataggattacaggaatgtgctaccacccccggctaattttgtatttttagtagagacggggtttctccatgttggtcaggctggtctcaaattcccaacctcaggtgatcctccctcctcggcctcccaaagtgctgggattacaggcgtgagccactgtatacccggcagtgtctggcttttaaatatgatgctgaggcctggcgtggtggctcacgcctgtaatccccgaactatgggaggctgagatgggcggatcacaaggtaaagagatcgagaccatcctggccaacatggtgaaacctcgtctccactaaaaatacaaaaaaaattagctgggcgtggtggctggtgcctatagtcccagctactcaggaggctgaggcaggagaatagcttgaacccaggaggcggaggttgcagtgagctgagatcatgccactgcactccagccgggtgacggagcgagactccatcttaaatcaatcaatcagtcaataaataagatgctgagccaggcacagtagttcacacctgtaatcctagcactttgggaggattgcttgaggccaggagtttagaccagactgggcaacatagcgagacccccgtctctataaaaaatttaaaaagtaggtggtccatgcctgtagtcccagctactcgagaggctgaggtgggaggatcagttgagcctcggaggtcaaggctgcaatgagctatgatcacaccactgcactccagcctgggtgacagagcgagaccccatcccaaaataaataaataaataagatgctattctgtctcctcctcccagtaggatgtcatctctgtaagaacgcgggtttgtctttttcttcactgctgtgtcctcagagcctaaaactgcacctggcacccaatagtcgctcaatcatgaaacagcctttgcagtcagccaatggctgcaatactggccgtgatcagcagatggtgagcgagcgcttatttcaaaacgggctgcgattctcttaagtccccacgtggggcgggtttgcgactcccctgtgcatttctcagaagaaaggtcccctaaatgcttacggccagtgagctcgaagagcacgcggtcattgaggcccagccgcagctctggcattcctgacagaaacaccttgagcttgatggtaccgacgatttcgctcagaaggacgctgccgttggcattgacctgagggaggacgttgggtatagttagcaggcatcaaactccgtctcctgcagccaggccgtggaaggggtgccggggaggtgtgcaggctcaccagcaggttgacagactctatgacatcaatgaagacctcgttcttcttatacttgataccctcggagcgccaggacacagcgttggtgacagtgggtggcacccgtgacttgcccgtctccagcttgttgctctgctgagtgatgtacctggagggagggcggcagggacaagcagctggacccagggacacctccgtggacctcctccagttccttacacccacagtccagcccatggctgcctccaggggtccactcactcctgcaggatcttgctgtcggtggtctgcgggaagccaaagtccatgagctcgtccagcaactcgtagacgatgacaaagttgtcccggatgctctcctcctccagctccttgaagtattcgcagaatacctgggggttggaggagagagagacccacaaaagtgtggctatgggttgggcatagtagctcatgcctgtaaccccagcaccttgggaggccaaggcacgaggatcacttaaggtcatgagttcaagaccagcctgggcaatatagtgaacccctatctcgttttttcttttttcttttttttttcgagacagtctcgcactgtcacccaggctggagtgcagtggcactatctcggctcactgcaactcctgcctccggggttcaagcgattctcctgcctcagccttctgagtagctgggactacaggcacgcactaccagggccagctaatatttgtatttttagtagagacggggtttcacaatgttggccaggatgatctcgatctcttgatctcgtaatccgcccactttggcttcccaaagtgctgggattatggcatgagccaccggtgcccggccatgagcccctatctctaacaacaacaacaaaaattttaataggagttcgaggctgcagtgagccatgaggatgctactgcactccagcctgcgtaacagaataagcccctgtctcaaaaagaaaaaaggccgggcatggtggctcatgcctgtaatcccaacaatgggaggccaagggaggcagctcacttgaggtcaggagtttgagaccagctggccaacatggcaaaaccccgtctatactaaaaatacaaaaattagccaggcatggtggcacctgcctgtaattgcagctactagggaggctgaagcaggagaatcacttgaacccaggaggtagaggttgcagtgagctgagattgtgccactgcactccagcctgggcaacaaagtgagaccctgtctcaaaagaaaaaacaaaaaagaaaaaagaaaaagtgtactgaatgcttgaaaaattaggcaaaaaagggcaggtatggtggcttctttttttttttttgagactaagtctcacagtgttgcccaggctggagtgcagtggcgagatcttggctcaccacaacctctgccttccaggttcaggtgattctcctgcctcaaccttccccgtagctgggattacaggcaggtgccaccatacccggctaatttttgtatttttagtagagaaggggtttctgcatgttggccagcctggtctcgaactcctggcctcaagcaatccgcccaccttagcctcccaaagtactgggattacaggcatgagccactgtgcctggcctttttctttttttttttaagcacagagacaagaagtcacttgctcaaggtcacacagtgaggaagcagggaagctgggattggatgccaagtccttgggcttagctgagccgtatgctctctgagacattcttggtccctgtcctttagggagagatgacttcataagcagctgatgagatgcagagtgatggggctttgatggcggatgcacagagactcaaacaaggccccagggaaggggtgagcgtggtggctcccatgctttgggaggccaaggcagtaggattgcttcaatccagaagttctagaccagcctgggcaatatagcaagaccccatctctaccagaaaaaaaaaaaagggaagacccagggagatctgggaaggcttcctatcagaaaaggatcttgaatcttgaaagaggcgggcaagagggatagacggatagaccagttagccaatgggaggctagtacctacctctattgtcttatacaggaaggagtacaccagggaggcattggcattcttcgatgtggtggccaccactggggcagcaaggttaaggaaaaggtgccatttatggagaagtaaatggaatacagaccccgaacctccaccctgtcccttgccaccaccctcatctctacctgcccctgccccccagcctaagccacagagatgtgcggtgcaactcctgtcctcagcccaccctctcttggcctgagctgccaccatcgccgacagcccccacacccacctccagggacaccacgtggggtggatacagtagaggttgctgtgtttgatccataggaagtggacctggccgtggctcagcagcggggccagggcgccttcctcctcccgctgtaccagcaaaggcatgaagtgctcaatcttgctcatggccacatcgcccttgtagttgcggctgatcaatggctgagggtggaaggaaaggacctggtcaccaccagcatccaagaacctaccacgctgaggaggcacagtgcccggttctgaccctacttcctagctgaggggcttgggcaaggctctgcctccttgtgcctgtttcctgctctgtaaaatgggagtgtgatgacaacagctaatgggtctagggccctcactaagtgccaggctgtgttttattaaagggtaggcgatggctggacgcagtggctcacgcctgtgatcccagcattttgggaggccgaggcgggtggatcatgaggtcaagagatcgagaccatcctggccaacatggtgaaaccccgtctttactaaaaatacaaaaaattagccgggcgtgatggcgtgtatctatagtcccagctactcggggtgctgaggcaggaggatcacttgaacctgggaggcggagattgcagtgagccgagatcgtgccactgcactccagcctggcgacagagcaagactccatctcaaaagaagaaagagagaaagaaagaaagaaagaaagtaaagaaggaagggaggaagggaaggagggagggtaggagggaaggaaggaaggaaggaaggaaggtaggcaggcaggctggctactaaaaaaagagtagatgtttactaacttattagttcttgccacaaccctgtggggtagatgttatcatcatctccatttcacacaggagaagtgaggttagaaaccatgtccactggaagcatatggaaactggggattgatctaaggcatcctgggtccagaatccctgctgttgccccagacttcatttgcaccaaagtgggattatttaaaaaaacaacaacaacaaaaaaaaaaaacaaagaagaggccaggtgcaatgactcactcatgaagaccaaggcaggaggatcccttgaggccaggagtttgagaccagctttggcaacatagcgggatccctctacaaaaaatttcaagaattagctgagcatggtggcctgcacctctgtagtcacagctactctggaggctaaggcagaagaatcaattgagcctaggaggtcgagactacagtgagctgtggtcatactactgcactccagcccgagcaacagagtgagaccctgtcaaaaaaagaaagaagaaaagaaagaaagaaagaaggaaagaaggaaagaaggaaagaaagaaagaagaaaaaaagaaagaaagaaagaaagaaagaaagaaagaaagaaagaaagaaagaaagaaagaaagaaagaaagaaagatgacagttcatatgattgtgcctggtagtcaggaagacacccataatagtaaacacttctgtctggacacggtggctcacgcctttaatcccagcactttgggaggctaaggcgggtggatcatgaggtcaagagttcgagaccatccaggccaacatgatgaaaccccgtctctactaaaaatacaaaaattagcttggtgtgctggcgcatgaccgtaatcccagctactcaggaggctaaggcatgagaatcacttgaacccaggaggtgaaggttgctgtgagctgagatcacaccagcctggtgacagagcgagactccatctccaaaaaaaaaaaaaattagttaaccacttcctaaggttgttttgtccagtgtctgaacagggaggacccatggcaggttctcaaacatcttagctctcactattaatattaatgggaatattattttcaccaccactcttattttggctattaaatgacaagacaggctgactgcagtggctcacacctgtcatccgaacactttgggaggctgaagcagggggatagctggggaccaggagttcaagaccatcctggacaacatagcaagactccatctgtacaaaaaaataaaaataaaaaataggccgggtgcggccgggcgcagtggctcatgtctgtaatcccagcactttgggaggccgaggtgggcggatcacgaggtcaagagattgagaccatcctgcccaacatggtgaaaccccatctctactaaagatacaaaaaattagccgggcgtgatggtgcgcgcctgtaatcccagctactcaggaggctgaggaaggagaatcacttgaacctgggaggtggaggttgcagtgagccaagatcatgccattgcactccagcctgggtgacaaggcgagactctgtcttgaaaaaaaaaaaaaatacaaaaattagccaggcatggtggcatgcacctgtagtcccagctactcgggaggctgaggcaggagaattgcttcaacccgggaggtggaggttgcagtgagccaagatggagccactgcactccagcctgggtgacagagcaagactctatttaaaaaaaaaaaaaaaaaaaaattaaaaatagccgggcatggaggggtcagcccgcagccccagatattcaggagtttgagagcagctttggcaacatagcgggatccctctacaaaaaaatgtcaagaattagccaggcatggtggcctgcacctgtgtagtcacagctactccggagactgaggcaggaggatcgcttgagcccaggaattccaggctgcagtgagctatgatcgcaccactgcactcaagcctgggagacagcaagagaccctgtctccaaaataaaaaaagacaagaggaataaaaggacttcaggaagaggcaaggcagccacagatggggggagttagaggcccctgttccagttgccttccccaggtattaacactgtggatgccgacagtgatggagataatttcaatttgctgagtccctaatatttccagaaaggccactatgctaagtagtttacacgcagcgagttgtattaattctcattgggtggggacctctgttgctcccatttttacatacagagaaactgaggccctaggaggcgaaccccttggcctcaggcacaaggcgagtggatgctggaggtgggattcccagggattgcagggggagggggtgttcccagacctcttcctggcccgcgcggaggggtcgcccctgaatccctgggagcgagacctcacctgtccgtctcccaactcctcatgcccagcctcaccttgcccttaacgtccagaatgaagacagccgaggcggacatggtggcggccgaaggacttaggagtcggggagggagcgccgggaggcgatggcggcgccgcttccttcttcctgcggaagcgcctgcgcccaggtgagagcccaggtgtgtgcgtcttaaaggggaggcggccaggtgagcagcgctgtcggccaacttgaagatggctgcggggccgggagaggtactgcgacttcagatgggtctgctgccccccttcactttccctagccacccaggagtaatgacgggtggagaccccaaaccaatcaaccatccttccatccattcattcatccttcctttcattcatctatccatccattcgtccatccatccattcattcttgcattcattaatccatccacgcatccactcatttagccattcattaatccatcttccatcgattcattgatccatccttccattcgtcatccatttcttcatccatttttgcattcatttatttgttcgtctatccattatccattcatccatccatttattcatccattcattcatcccttcttgcattcattcatttattcatctttccattcatccatccattcatccattctaacattcatcaatttattcatctatccatccatccatccatccgttcatccattcttgcatcattaatttattcatctatccattcatcaatccatccatccatccattcttgcattcattaatttattcatctatccattcatccacccatctatccattcattcatcctctcattgattcatccatccattcaccttctttctcctctgtctcacccacacacgtcagcccccatacagcagggactttgtcttgttcatgtttatgtccctagtgctcagcactgggtgctcaaaatttgcccaattcattcattcactcattcatataataattttcactggtgaattttactgactgaatttgaaatattcattcactcagtaacaggaactgtggatataattccgagcaggacaaatgtacttgcttttattattcttacaaatttactcttattcatttcaaataaaaaatttatttttttttgttttttgaaatggagtctcactctgttgcccatgctggagtgcagtggaatgattttggctcactgcaacctccacctcccaggttcaagcaatcctcctgcctcagcacccctagtagctgggattacaggcaagcgccaccatgcccagctaatttttttttttttttagactccaggctggagtgcagtggcatgatctctactcactacaacctccgcttcccgggttcaagggattctgctgcctcagcctcccaagtagctgggattacaggtatgcgccatcacgcctggctaattttgtatttttaatagagatggggtttcaccatgttggccaggctggtctcgaactcccgacctcaggtgatccacccgcctcagcgtcccaaagggctgagattacaggcgtgagccaccgcacccagccaaaaaactttttttgtagagacagggtctcactctgtaccctagactggactgcagtgatgcaatcatggctcactacagcctcaacttcctgggctcaagccatcctcctgcctcagcctccctagtaactggaactacaggcacaaaccgccacacccagctaattttttttgagacagaattttgctctagtttaccaggctagagtgcagtgatgtgatctcggctcgctgaaacctatgcctcctaggttcaagcaattctcctgcctcagcctcccgagtagctgagattacaggcatgcgccaccatgcccggctactttttttgtatttttagtagagacagggtttctccatgttggtcaggctggtcttgaactcacgacctcaggtgatccacccgccttggcctcccaaattgctaggatgacagatgtgagccactgcgcctggccacaactagctaatttttttttttttttttaatttggagtctcgtcctgttgcccaggctggagtgcaatggcacaatctcggctcactgcaacctctgcctcccaggctcaagcgattctgctgcctcagcctcccaagtaactgggattacaggcgtgcaccaccaagcccagctaattttttgtatctttagtagagatggggtttcaccatgttggccaggctggtctcgaactcctgacctcgtgatccatctgccttggcctcccaaaatgctgggattacaggcgtgagccactgcgcctggcccacacctagctgatttttttttttttttttgagacagagtctggctttgtcgcccaggatggagtgcagtggcgcaatctctgctcactgcaacctctgcctcccagcttcaagcaattctctgcctcagactcccaagtagctgggattacaggcgcctgccaccacgcccggctaattttttttttgtatttttagtagagacgggggtttcaccatcttggccaggctggtcttgaactcctgacctcgtgatccacccgcctcagcctcccaaaatgctgggatgacaggtgtgagccaccgcgccaggccaggcccacctagctaatttttttttttctttgagatggagtctcgctctgttacccaggctggagtgcaatggcgcgatctcaactcactgcaagctccgcctcccaggttcacaccattctcctgcctcagcctcccgagtggctgggactacaggcgcctgccaacacgcctggctaactttttgtacttttagtaaagacagggtttcaccatgttagccaggatggtctggatctcctgacctcgtgatccgcccgcttcggcctcccaaagtgctgggactacaggtgtaagccaccgcacccggcccgacctagctaatttttacattttttgtagagatggtgtatcggtatgttgcccaggctggtctcaaactcctgggctcaagcgatcctccccccttggccctccaaagtactgggattacaggcgtagtctgagccactgtgcctggtttgtgcagattaaatgagttattctgtgcaacgtggtgttggaagggaacttggatgtagctgactgtcaaccatgtcgctgagaaggaggaggatgaagatgatgatctggatgatgatgtagcagttgagagcacagatgctgggtttgatttttgataccaccacacactggctataaggcatgggctggtgaatgcacctgctgtgcctcagtctcctcttatgttaaatgggtataacagccatggtgccctctcctgcagttgcatagccaaatacctggcatggcccctggctccatgcatgtttcgtgcacaccagctgctgcagacccagattccacccctggactttccttttttttttcttttgaaatggagtctcagtctgtcgccaggctggagtgcagtggtgcgatctcagctcactgcaacctctgtctcctgggttcaagcgattctcctgcctcagcctcccaagtagctgggactacaggtgcactccaccatgcccagctaatttttgtatttttattagagatggggtttcaccatgttgaccaggatgctgtcgaactcttgacctcgtgatccgcccacctcagcctcccaaagtgcggtagttttgaggacagggcagaaggaaagggaaagtaaacctcagccttgcttagaaccaccttgcttggctgagggagggagatgtcctgcagggcctgcagggaacaagactcagcctacccagacctcacttgtcctttccccaaaccctgcccagccctttatcagcccctgtaggtggggacttagagaacagcagctatcaggatcatccacttgcctctccacctgaaattaacatcaacattgacagcagcactgcactttaattaaaacattatcatctgggccaggagcaatgtttcatgcctgtatcccagcactttgggaggccaaggtggacagagcacctgaggccaggagtttgagaccagcctggccaacatggcgaaaccctgtctccactaaaaatacaaaaattagccgggcgtggtgacgcatgcctgtaattccagctacttgggaggctgaggcagaagaatcacttgaactggggaggcggaggttatagtgagccgagatggcaccactgcactccagcctgggtgacagagtgagactccgtctcaagaaaataaataaatagaatgaaaaataaaaagttatcatctggcacaagtctccttcgtgccatcttataaaggtagaagcagggacacagagaagtgaaggcacctgcccaagcccacggccccagagccaggaggcagttgacccagaattcgaatctgagtcccgggatttaagaatctggtcccagcctgcttccgcctgctttgctatattgctggatgcaaatattactattagtaacactaactctggcttaaatggtgctcaccataagtgagggtggccctaaatgtcgcccatgcaggaatcctcaagacagccccttgaattacagaagcctattttttttttttatttatttgagacaaggacttgctttgtcgcccaggctgcggtgcagtggtgcaaacacggctcactgcagcctcaaccttctgaactcaagagatcctctcacctaggcctctccagtagctgggactacaggtgagcaacaccactcccagctaatttttaaattttttttttttttttttttgagacagagtcttgctctgtcgcccaggctggagtgcagtggcgcaatctcggctcactgcaacttccgcctcacaggttcacacccttctcctgcctcagcctccggagtagctgggactacaggcatccgccatcaagcccggctaatttttttgtatttttagtagagacggggtttcaccgtgttagccaagatggtctcgatctcctgacctcgtgatccgcacacctcagcctctcaaagtgctgggattacaggcgtgagccaccgtgcctgcccaatttttaaattttttgtagagatggggtctcgctacgttgctcaagctggtcttgagcttctggcctcaagctgtcctcccacctcagccttccaaaacactgagattacagacacgagtcacctcccccaactctattatcttcatttgacagatagggaaactgaggccttgagagagtaagtgatttgtacaatgtcatccagtcagaagaagcagagctgggatttgagctctggaaagcacaaggtttttttgttttgttttgttttttgttttgagacagagtctcgctctgtcgcccaggctggagtggagtggtgtgatcttgactcactgcaacctccgcctcacgggttcgagtgattcttctgtctcagcttcccaagtagctgggaccacaggtttgtgccactatgcctggctaatttttgtatttttagtagagatgggggttcgccattttggccaggacggtctcaaactcctgaccttgtgatccgcccgcattgcacgttggcctcccaaagtgctgggattacaggtttgagccactgcacccggacttttttgttttttgagatggaatttcactcttgttgcccaggctggagggcaatggtgcaaccttggctcaccataccctccgcctcccaggttcaagtgattctcctgcctcagcctcccaagtagctgggattacaggcatgcaccaccatgcctggctaattttgtatttttagtacagacaaggtttctccatgttggtcaggctggtctcaaactcccgacctcaggtgatccacccacctcagcctcccaaagtgctgggattacaggggtgagccatcgcacctggccctgattattattattattattattattatttttgaggcagggtctctgtcacccaggctggagtgcagtggtgtgatctcagctcactgcaacctccacctccccaggttcaagcaatcaagcaattctcccaccccagcctcctgcacagctgggaccacaggtgcgtgaccaccacatccagctaatttttatactttttggtacagacaggtttcacaatgtcgcccaggctggtctccaacttgtggacttaagtggtccacccgcctcggcctcccacagtgctgggattataggcgtgagccatctcgcccagcctaaagcccaagactttatgttgcttctgcccaaaggaggggggtggtccttcatgctcccagcaactgcctgctgagaaggtcacctagggggatgcagtcactgctaggccctcaccccagcctagacattgctgaacctcaaaataactcgtctcctggcagccgggcgtggtggctcacgcctgtaatcctagcacttcgggaggctgaggtgggtggatcacctgaggtcaggagtttgagaccagcctggccaaaatggtgaaaccctgtctggactaaaaatacagaattagccgggggtggtagcacatgcctgtaatcccacctactcaggagactgaggcaggagaatcacttgaaactgggaggcagaggttgcagtgagccaagattgcgccattgcactccagcctggggcaatagagtgagactctgtctcaaaaacaacaacaacaacaaaatgaagaactcatctcctggggccctgagatgttttcaggcagtaagcagaacccgaaagcctgggcccagtgccctggaatctgaaactccaggcttgtttggcatgaaaaattcatgagcccaaaagcttacttggggtcagagaacagagcagctctgtgtgctggctctgcctgccccgcctgccccacctcagtggcggcctcccccatccccctgaggctgtggccttgtcctagttccttctggatgcctggagcctcctccagcctctcccagggaccacgcctctaggccctgtccacaatcccttctccacaccactaaagagatctctctgaaactcacaattattttttgactctcactctcacatcctctatggccccccattgccctccaaccacccccacctggcacagtcagacacctgctgacctctgccacaggacaccacctgaacctgctgtcccagacaccctaactgcccgaatttcagttcctctcctgctgtctcaagccatcctcccacctcagcctcccaagtagctgagactatagacacgtgccaccacagctggccaccttagccattttgaagtgcacagttcggtggcattaagcacattaatggccatgcaaccgtcaccaccatccatctccagaactttctcatcttcccaaaggaaaacttctccctatgaaacactccttctccctctcccaacccctggcacccactcttcttcttcttcttcttctccttttccttctcctcctcctccttcttcttcttcttttcttttttttatttattttgagatggagtctcaccgtcaccgaggcttgagtgcagtggcacaatctcggctcactgcagcctccatctcctaggttcaagcagttctcctgcctcagcctcctgagtagctgggattacaggcgccccccaccacgcccagctaattttatttttttatattttatttattcatttacttttattattttattattatttttttttgagacagagtctcgctctgttgcccaggctggagtgcagtggcacgatctcagctccctgcaagctctgcctcccgggttcatgccattctcctgcctcagcctcccgagtagctgggactacaggtgcctgccaccacacccggctaatttttgtatttttagtagaggcagggtttcgccatattggccaggctggtctcttggccaagctggtctggaactcctgacctggagatgtgcctgcctcagcctcccaaagtgctgggattataggcgtgagccgccgcgcccagcttttttttcttttttttttgagacggattctcactttgtcgcccaggggctggagtgcagtggcgcaatctcagctaattgcaacctcctccttctcctagttcaagtgattctcctgcctcagcctcccaagtagctgggattacaggcatctgccaccacgctgggctaatttttgtatttttggtagagactgggtttcgccatgttgactaggctggtctcaaactcctgacctcaagtgatccacccatctcagcctcccaatgtgctgggattacaagtgtaagccaccatgcccagctactcaggagtctgaggtgggaggatcactggagcccagaagattgaggctgcagtgagctatggttgcaccactgcactccagcctcggtgacaaagcaagaacctatcttaagaaaatactgtgctgagccagttcctgagaaaacaaaatagaaaacaaaactaaagaaaaggcaaaagttcctcccagcagagatgtgagagaaaaagaaaaaaaaagtcccctgtgacacccccataccccaatcttcgtccctctcataaccactggctgattcagatctttttcagctgggttacatgcaggggggtgtgtgtgtgtgtttgtgtgtgtgtgtgtgtgtgtgtgtgtgtgtgcgcgtgttgccctctttctctctctttctcccataccatataagactatacaacttgtggatgggcacagtggctctcacctgtaatcccagaactttgggaggcagaggcgggtggggcacttgaggccaagagttcaagagcagcctgggcaacatggcaaaaaatctgtctctactaaaaatataaaaactggccaggtgtggtggctcacgcctgtaatccctgcactttggaggctaaggcaggtgaatcacctgaggtcaggagtttgagacaagcctggccaacatgataaaatcctgtctctactaaaaatacaaaaaattagccaggtatgctggcggacacctgtaatcccagctactcgggaggctgaggcaggagaattgcttgaacccaggaggcagaggttgcagtgagccgagatcatgccactgcactcgagcctgggtgacagaacaagaatctgtctcaaaaacaaaacaaaacaaaacaaacaagcaacaacaactatatatatatatatatatatgtatatagactaagctgggcatggtggtgcgtacctgaaatcccagctactccagaggctgaggcacacaaatcacttgaacccaagagaaggaggtttcagtgagctgagctcgcaccactgcactccagcctgggcgacagagagagactctgtcttaaataaaaaaaaaaaaatacaacttgctattatcactcaacaatatgacctggacgctactccggaaagcatgtggttgaaggggaaggaagtgtgtcttgggtgtaaagtcggactccctgggttcagatccttgcagagccacgggctcattatgttactgtgggtaaattacttcacctctctgggtcactttccccaattggaaaatgattataatgatttaatacagagtgcttgggccagacgcggtgtctcacgcctgtaatcccagcactttgggaggccgaggcggtggatcatgaggtcaggagattgacaccatcatggctaagacagtgaaacccgttcttcactaaaaatacaaaaaactagctgagcgtggtggtgggtgctgtaatcccagctactcagaaggctgaggcaggagaattgcttgaacccgggaggcagatggtgcagtgagctgagatcacgccactgcactccagcttggcgacagagtgagactccatctcaaaaactaaaacaaacaacaacaactatatacacacacacacacacacatacacacacagagagcactttactgggtgagccaagatcgcgccactgccctccagcagccttggttcaaaaaaaaaaggtgcttggccagcatggtggctcatgcttgtaatcccagcacttcaagaggccaagatgggcagatcgattgaggctaatgagacctggtctctatttcaaaaaaaagaaaaagagttaaaaaaatatataaagcatttaataccttgtctgacactgactaagctttctataaacattcactctttctttccttttttttttttttgagaccgagtctcgttctgtcacccaggctggtgtgcaatggtgcactcttggatcactgcaacctctgactcccaggttcaagtgattctcctgcttcagcctcccaagtagctgggattacatgcatgtgccaccacactcggctaattttgtatttttagtaaagacgggatttctccatgttggtcgggctggtctcgaactcccgacctcaggtgatccgcccgcctcggcctcccaaagtgctgggattacaggtgagagccactgcgtctggccttagagacagattttcatcgtgttgtccaggctaatcttgaactcctgtcctcaagtgaccctcctgcctcccagagtgctgggatcacagatgtgagccaccactcctggctgtaaacagtcactcttattataatctgcaggaccaccaccttttttcttaaactattttaaaaattctcattttgaaatgtaacttttttatttattatgtatacaaacacacatatatatttgcatcataaatgttattcccaatatgggacagattcctttcaacccccaggtgaatcacatggtaccctggaaagacctaggaagccctccctcccaccatctccagggaggtagtgagaacggcaggtgctggggactgggaaggctttggagtttcccagcctacctcttctccctttctcaacaaaggatacctgttccctattattccccttatccactcttcccttttttaaaaaaaacccacaaaaccatcattagtaaaaaaacaaacaaaaccccttcaagtattgggagttaggggtcctgggctgggacttggagttacaggtcaccaaggaagagggaagggaagagaaggaggggctgtcacttactactgctggctttcttccttgctgcatgctatggcaactgtgtgtcgacctcctttgctggcaactgcacgtatgggaccactgagcccggaatgaaacagtcctttttaaaaaactttttttgagacagagtctcgctctgtcacccaggctggagtgcagtggcatgatttcagctcactgcagcctccacctcccgggttccagcaactctcctgcctcagcttcccgagtagctgtgaatacaggcgcccgccaccacatccggctaagttttgtattttagtagagatggggttttgccatgttggccaggctggtctcaaactcctgacctcaggtgatccacctgccttggcctcccaaagtgctggggttacaggtgtgagccactgcacccagcctagaagttcttcactgataaaatgtgaggatatttctcaaggtgtgtgatactgatgtcagctcatttgatgttgagatactgatccaccgaatggagggtgccacagatgttcaggtctttcttgagttccatgaccacattcatgcccacaagggacttgaaaaaaggaatagaagagcatgatgctggcgacctgaccaggaagagcaacacatattttattttatttatttatttatttgagatgctgtctcactctttcacccaggccggagtgcagtggtgcaatcttggctcactgcgacctctgcctcccggggtcaagcaattctctgcctcagcctcctgaggagctgggattacaggcgcccgccgccacgcccgtctaatttttttttttttttgtatttttagtagggaccaggtttcaccaagttagtcaagctggtcttgaactcctgaccttgtgatccactcaactcagcttcccaaagtgctgggattacaggcgtgagccaccgtgccgggccagcaacacatattttaaaagggcagaagtcggttgggcacagcggcttacacctgtaatccctgcactttgggaggctgaggttggtggatcacctgagatcaggagttcgagaccagcctgggcaacatggcgaaaccccgtctctactaaaatacaaaaattgccactgtactccagcttgggcaacagagcaagattctgtctcagaaaaaaaaggcaggcagagtacgggggagaaggtcaagtattcacaaactaaactaagctatgtaactacaattctgtttccagtgcccagaagctgctcctatcatcccagtagttattactaccccaaaagtcaaccactgatatatgttctgttactataggttgattagctatgcctgttcttgaacttcagaaaaaagtgtgtggtttctttcacacaacattatgctttttggggagagattcatccatatttttgcctgtatcaatagtttattcctggaccaggcgctgtggctcacacctgtaatctcagcactctaggaggctgaggcagaaggatcacttgagaccagcctgggcacccatagggagaccctcatctccacaaaaatttaaaaaattagccgagtatgtccaggtgcggtggctcatgcctataatcccagcacttttggaggctgaggggggcggatcacctgaggtcgggagttccagaccagcccgaccaacatagagaaaccccgtctctactaaaaatacaaaattagccaggcgtggtggtgcatgcctgtaatcccggctactcagagactaaggcaggagaatcacttgaacttgggagacggaggttgcggtgagctgagatcacaccattgcaccattgcactccagcctgagcaacaagagtgaaactttgtcaaaaaaagaaagaaagaaagaaattagccaggcatgatagtgtgtgcctgtagtcccagcaacgggaggctgaggcaggaggatcacttgagctgaggaggtcagggcttcagtcagctatgactgcaccatcgcaatccagcctgggcaatacagcaagatcctgtccctaaaaaaagaaagaagaaaacattcattcctcatcactaaggagaatcccatggtatgggtgaaacccaccatggtttgcttcaccaatgatctgttaatgggcatttgggctgctcctagtttttttgcccactacgaataaggatactataaggctatcatgaacatttatatgaatgtgtctgtgggtttttcttttcttcacttatactttttcttgggtatatacctagaagtgcaatttctagggtattaactttgcaagaaactgccagatcgttttccaactggttgtggcattttacattctcaccaacagtgtaggagagcccccatatgcttcccatcttcctcaacacttggttcgaccagtctttttaattttagctattcaggtgggtgtgcaatgatatctcatcgaggttttgatttacatttccctgatgacttcgtgctttattcttttttctttctttctttctttttttttttttttttgagacagggtctcactctgtcacccaggctggagtgcagtgatgttttcacccatttttctttctttttttttttctttttgagacagagtttcgctttttgcccagttctgttgcccagtttggagtgcaatagcgtcatctcagctcaccgcaacctccacctcctgggttcaagcgattctcctcctcagcctccagagtagctgggattacaggcatgtgccaccacaccaggctaattttttgtatttttagtaaagacagggattctccatgttggtcaggctggtctcgaactcccgacttcaagtgatccgcccgcctcggcctcccaaagtgctgggattacaggcgtgagcctccgcacccggcctgttttcacccattttttccacaataactgtcaaggctgcagggaacaccccttggttactacatcccatgcacacacacctgcagtggtttgtccagggtcagtgccagacaggaatcgcaccaggtgaacatgacttggatatactctttctgccaggaaacattctgcttcaaagtattcactcacctgattttatgttattaaactctaaaattcttaccaatctgatgaatgaaaatggcatcttttggtatgttcagtggtacacggtgatcaatatttacctatcaattatttatctatccatcttctattattatttttattttattttattttattttattttttgagacggagacggagtgtcgctctgtcgcccaggctggagtgcagtgacacggtctcggctcactgcaagctccgcctcccgggttcacgccattctcctgcctcagcctcccgagtagctgagattacaggtgcccgccaccactcccggctaatgttttgtatttttagtagagacggggtttcaccgtgttagccaggatggtctcgatctcctgaccatcttcccgcctcggcctcccaaagtgctgggattacaggcgtgagccactgcgcccggcctattattattattaattcttattattattttgagacagggttgcccaggcagtggcacaatcatagctcactgcagcctcaaactcttggactcaagtgatcctcctacctcaggctcccgagtagctgaattacaagtgtgcctcaccaagcccagctaattttttaaattttttgtacagatgagggtcttcctatgttgcccaggctggtctggaactatttggcccaagctatcctcccgcctcagcctccggagtggctgggattacaggcccgcgccaccacgcccagcctcaatatctccttgacgatgaaatgcatagatgaatgaatgaatgaatgacctctgtttgctcaccatgcacaccctcaagagggttacttgagagctaagactggaaacaaaggttggggccccacccctcccgggccaggccccgcccccggtccccgccctcgccctctcgaggctcccattggaggaggcgcgcgggggctggcccggcgggaggggcggggccggggcccggggcggggcgctgcagcccgcggagcctcccgcccgcccgggctggggtcgcgctggctcggactccgctccccgccccgccgcggccatggaggacgagcggaaaaacggagcctacggtaggagccgcctccggtcaggggccgcctctgctgacctgcgggtgggaggaccttgagccagggggacatctgagaccctaggcaccggcgctgcggctggatggccctccgcgctcgggcccccgcatccgacactgcgcggatcccacgccccctgctctaaccgggtcgccccgcgtcccctccccgggagccccagctccccctccggctgatgggccggggctcacggcgcatgctccgcccggggaggtcccgttatctgggcggctcggatggcgggcgggggaggggaggcgcggcgatctgggctcggaaaagagacagggccctgacctcctcaaatccccctcctcttccaatcccctttgtccatttcttcctccttcccttttccgccagaagtagccgtccggggcttttggccagatggggaaactgaggcaagactgggcagaccgaatacccagctgagagcccaccgagtctggccagccgcctggaaacggcggaaagaagggcgcctttggtgagggggcaggaaggaagcaggaaaaaattgagaaactttcccctccctgtgcaaggggctggcggctcccacctcccatttcgagaggtgctggcgactggaacttcctccggcgaacctcttggggcgacctcaggcatttggccccggggatgggcccaggatgtgggcttctccatcaccagcgccctgtggtgccgccctcccctgaattcccacggtgggaggagttgccatcctcagtttctcctttctcttctccattttgggtccccaagacccaacggagccccagccccacgtgatactaccctgggggcaaagaagcactgtcgcgcccctctttgtgtgacaagaacttcctggaaactgtgacactgaagggccctggggagggggccggaaacggctcgaaaatattcaagaaaaacaagttgggtagagctgtgcctccctgcccccagggactgtatggcctcaggaggctgccaggagagacagatcagggaggctgggaccttccctgcagagcccagccaaggggaggcagcaggacctggccacctcccagcaccccctccccaattgaagcttccagcccagtcccctggagggacccccttggtcttcatttgggctcaaattccagccccagtggctgtgggtgctgtgtgtcccttgggtgtggcaggctgtctctgacctgagagtctcagcctgaggttctagccaggtcttgcccgcttgtgggcagcatctgagggggtcttgggtctctatgaagtttggctgggacagggacgaggggcagaatggacaatgatatgattcacccagccttgaatttggccaaaggatggaattgagctgtggtcggagctaggcagacctcccaggcccacacatgagacaggggaccctgccagacagagcctttgctgggcttaagggagtaccttcaatcaacaaatatttattgagcacgatttaggcaggggtctagacactggaaacccagcagtgaatagaccagtgaaatccttgaccgcagggagtagtcaagggaaggaatgtgtaattttaggttgttgtaagttgtgaagcaaagaacaagacgtcgtgtgatcttgtgtggcagaaacagcagcgattattttaggttactaagggctggaggttgagccagccgtgggaagatttaggggaagtgtgtttcacacagaaagaacagcaaacaaaccacgtagttacttaattacattttgccttggggccaaagggggcatctggtttgattgcttgaagtaggggttttgcttagcttggaagtagttccttcacatcagaaccaaaaacctgggggccttggactggcccatgacgtccctgatagatgaagggagctttcccctggggatggtgtggaagaggggctcacttatcctaccctcctgccccagtggcttcccatccgtcatgagtttaggggctgacatcagacaaacctaggctcaaatcctggctctgacacttaggagccgtgtggccctgggtgagtccgtgacctctctgaagctctgtgtctttgtctataggactcggtggaccacactcactggtgggggaagaattttgcataggctgtcaagctcgatgtgctcaggaggcctctggggctggtagtactggggacatggctttcccgtgagctgatagagaagcaacccaaggcattgacttgggtgagaccaggttgggcaggaagtgcattcctcagcagagatcatatctaaaggaaggcagcagttccaagggaaatggggaaatggctctgggccccggcggatgtcagcaatgggcattgccatccttcccagccagcccacccttggcaagagcagtgcagaaaaagattctgcaatccaaaacaataaactctgaccatggagaaataaaactggggtcggggggacagtagtgatgcttatttaaaaaacggactcttgccaggtattgtggctgacacctgtaatcccagcactttaggaggccaaggctgggggatcacgaggtcaggagatcgagacaatcctggctaccacagtgaaaccccatctctacaaaaaataacaaaaaatgccagccacagtggttcatgcctgtaatcccagcactttgggagccaaggcaggtggatcacctgaggtcgggagttcgagaccagcctgaccaacatggtgaattcccatctctattaaaaatacaaaattagccaggcatggtggtgcatgcctgtaatcccagctactccagaggctgaggcaggagaatcgcttgaacttgggaggcagaggttgcggtgagccgagtttgtgccactgcactccagcctgggcaaaaagagtgaaattcagtctcgaaataaataaataaataaataataaaaatacaaaaaattagtgtacctatagtcccagctactcgggaggctgaggccggagaatcgcttcaacctgggaggcagaggttacagtgagccaaggtggcgccactgcactccagcttaggtgacagagtgagactccgtctcaaaaaaaaaaaaggactcttggccaggcaaggattacaggttcacacctgtaatcccagcactttgagaggctgaggtgggtgggtcacttgaggtcaggagatcgaggccagcctggccaacatggtgaaaccccgtctctattaaaaatataaaaattagccaagcatggtggtgcacatctgtaatcccagctacttgggaggctgagacaggagaactgattgaacctgggaggcagaggttgcagtgagctgagatggtgccactgcactccaacctgggctatggagcgagactccatctcaaaaaacaacaaaaaccagactctggctgggcagtcgctgatgcctataattccagcactttgggagtcccaggtgggaggatcgcttgagcccatgagtttgagaccagcctgggcaatatagtgagaccctgtctctacaaaaaaatttaaaaattaactgagcatggtggtgctcaactgtattccagctacttgggaggctgaggtgggaggattgcttgagcccaggaggcagaggttgcagtgagcaaagatagcgccactgcactccagcctggatgacagaggaagaccctgtctcaaaataaaaagcagattccctggtcccatttgctagaatacaattcagcctgcagtgaggccctggcacctgatttaaatatatatatatacatgtggccgggtgtggtggctcacgcctgtaatcccagcactttgggaggccgaggcaggtggatcacctgaagtcaggagttcgagaccagcctgaccaacatggcgaaaccctgtctctactaaaaatacaaaaattggctgggcacagtggctcacgcctctaatatcagcactttgggaggccgaggcaagtggatcacctggggtctggagtttgagaccaaccttaccaatatcgtgaaaccctgtctctactaaaaatacaaaaatgttcttggaatagtgacgtgcacctgtagtcccagctatgtgggaggctgagacaggagaattgcttgaacccaggaggcagaggttgcagtgagctgagatcgtgccatttctctccagcctgggtaacaagggcaaaactccatctcaaaaaataattatatacatatatattaaaatatatatatacacatacacatatatatgtatgtatgtatgtatgtatgaaaaggtagttacttacggctattttttttttttttttttgagacggagtctcgctctgtcgcccaggctggagtgcagtgacacggtctcggctcactgcaagctccgcctcccgggttcacgccattctcctgcctcagcctcccgagtagctgggactacaggcgcccgccaccacgcctggctaatttttttgtattttttagtagagaccgggtttcgccatgttagccaggatggtctcgatctcctgaccttgtgatcagcctgccttggcctcccaaagtgctgagattacaggcgtgagccacctcgcccggcctcttggggctattttctttgaaagggataatacattcacatgctttaaatacaaaagatacaaaagatgttacggctttgagatgaaagtttccctcttgctctcccaccccggaccatactttattctttgttgttgttgttgttgtttatacacagggtctcactctgtcacccaggctgggctagagtgcagtggtgcgatcatagctcaccgcagcctcaaattcctgggctcaagtgatcctcctgcttctgcctcctgtgtagttgagactacgggtgtgtgccgtgatactcaactaatttttttttttttttttttttagaggcagggtctcaccatgttgcccaggctggtcatgaagtcctgggctaaagcaatcctcctgtactggcctcccaaagtgctaggattataggcgtgggccaccacacccagcttttttttgtttatttgttttgcctaatatacattggagaggatctcttgtcaacacctccaaagcttcctcaatcatttattattattattattatttttttttttttgagacggagtctcactctgtcgctcaggctggagtgcagtggcgtgatctcggctcactgcaagcaccgcctcccgggttcatgccattctcctgcctcagcctcccgagtagctgggactacaggcgcccgccactgtgcctgccactgcccccggctaattttttgtatttttagtagagacgggatttcaccgtggtctcgatctcctgacctcgtgatccgcccccgcctcggcctcccaaagtgctgggattacaggtgtgagccactgcgcccagccaccccgtttctactaaaaataaaaaaattagctgggcatggtggcatgcacctgtagtctcagatacttgggaggctgaggcaggagaatcgcttgaacccaggaggtggaggttgtagtgagccgagatcgcgccactgcactccagcctgggcaacagagcgagactccgtctcaaagaaaaaaaaaaaaaaaggagagacagggtcttgctatgttgccttggctagcctagaactcctgagttgaagggatcctcccgcctcagcctcccgagtagctgggactgatcacaggtgtgtgccatggcgcccagcacaatcttttttcacggtagcatagaatagtacatttgtggatgggctgtcttttatttagccaatcaaagggaatatttattttaaactttttttcgaagttggaaatacatacataaaagggcatagatcctaaatatatgaggctgaaggagctttcacaaggtgaacaccttatctggccagcaaccagatgaggaaaaaagaacatttccagggccctgtcatgtgcaaggagggcctatttgtattattattttattagtatatatatattttatttatttatttatttttttaatttgagacagggtctcactctgtcacccagggttaagtgcagtggtacaatctcggctcactgcaacctctgcctcctgggtttaagcaattctcctgcctcagcctcccaaggacctgggactacaagattcgagttaccgtgcccgattaatttttgtattttttgtagagattgggttttgtcatgttgcccaggctggtctggaactcctgggctcaagctatccacgtgcttcagcctgccagagtgctggggctagagtcgtgagccactgcacccagcctacctttttttttttttttttttttgagatggagtcttgctctgttgcccaggctggagagcagtggcgccatctcagctcactgcaaactccacctcctgggttcaagcgattcttctgcctcagcctccccagtagctgggattacaggcatgtgccaccacgcccagctaatttttgtatttttggtagagacggggtttcaccatattggccaggctggtcttgaactcctgaccttgtgatctgcccaccttggcctcccaaagtgctgagattacaagcgtgagcaaccatgcccggcccagcctacattttaaattgaagtataatttggtttgtttttgttgcttttttcttttttttcaagacagaatcttgctctgtcgcccaggctggagtgtagtggcatgatctcagctcactgcaacctccgcctcctgggttcaagtgattctcctgcctcaggctcctgagtagctgggattacaggtgcacctcaccacgtccagctactttttgtatttttagtagagactgggttttgccatgtttgtcaggctggtctcaaactcctgacctcaagtgatccacccgcctcagtctcccaaaatactgggattaaaggcaagagccactgtgcctggcgaagtataatttacatactaaaaaaaccacacattattagtttttttgtagagatagagtcttgctatgttgtccaggctggtcttgaactcctgggctcaagtgatcctcccacctcagcctctcaaggtactgagattacaggtgtaagccaccatgcccagcccataactctttttaaatgtacagatctatgatgttactcttatttatttatttattttttgagacagaatctgtctctgttgcccaggctgaagggcagggcacaatctcggctgactgcagcctctgcctcctgggttcaagttattctcctgcctcagcctcccgaatagctgggattataggcatgcacaaccatgcccggctaatttttgtatttttagtagagacagggtttcactatgttgaccaggctggtctcaaactcgtgacctcaaatgattctcccactttggcctcccaaagtgctgggattacaggcgtgagccaccgagcctggctaatgttacttatatttagattgttgggtggtggcctgtttttgtaaggctagtgggctaagaatggctcttatatttttaaatggttgtgaaaaaagaaaaaaaaatatatatatatgacagatgatatgtgaaccacaaagcttaaaatctttaatatcttgtccttaacagaaaacatttgcagagccctggtagagaattctccctagagacttttcttttccttttttttttttttttttgagactgagtctcactcagtcacccaggctggagtgcagtgacgtgatctcggctcactgcaagctccgcctcccgggttcacgccattctcctgcctcagcctcccgagtagctgggattacaggcgcccgccaccatgcccggctgatttttttgtatttttttagtagaaacggggtttcactgtgttagccagatggtcttgatctcctgacctcgtgatctgcccgcctcggcctcccaaagtgctgggattacagtcgtgagccaccgcgcctggctttttttttttttttttttttttttgagatggagtttcactcttgttgcccaggctggagtgcaatggcgtgatcttggctcactgcaacctttgcctcccgggttcaagtgattctctggcctcagcctcccgagtagctgggattacaggcatgtgccaccatgcctggctcatttttgtatttttagtagagacggggtttcaccatgttggccaggctggtctggaactcctgacctcaagtgatccgctcgcctcggcctcccaaagtgctgggattacagttgtgagccaccgcgccccgccaagacttttcttttgccatttcccaatcgatccccaaggtgaacatgatatttatttatttatttttaatttaaaaaaaaattttttttgagagggagtcttatgatgttccccaggctggttgaattccccggctgaagcgatccttccccttcaacctcctaagtaggggactataggcatgtgcctctgtgccgggctagagagcattattttaaaatattattttaggctgcgtgcagtgcctcacgcctgtaatcccagcactttgtgaggcccaggcgggtaggtcacttgaggtcaggagttcgagaccagcctgaccaagatggtgaaaccccatctctgctaacactacaaaatttagccaggcgtggtggcaggtacctgtaatctcagctactcagggggctgaggcaggagaattgcttgaacctgggcagcagaggttgcagttagccaagattgcgccactgcactccagcctgggcaagagagtgagacactatttcaaaaaataataaataaataaataaacaaacaagagacccggtgcagtggttcactcctgtaatcccagctgtttgtgaggccaaggtgggtggatcgtggttcactcctataatcccagctgtttgtgaggccaaggtgggtggatcgcttgagtccaggagtttgagactagcctgggcaacattgcaaaaccccttcttcccaaaaatatgcaaaaaaattagctggtcatggtggcttatgcctgtggtccgagccactctggagggtgaggtgggaggattgcttgagcctaggaggcagaggttgcagtgagccgacattgtgccactgcactccaacctaggtaacagaatgagaccccatctcaaatatacaagtaaacaaataaactcttacataataaaattaataaattccctctgttctggcagggggactaaaagctaattataagtaagtcctcaagtccatggaagattttagctttccatgtgaaagaatcttctacaaatctttggctagctgttttcacctcagaggtagctcagccaagaagtctccttccagattgtgacctattaatttctgtgtgtgtgtggcatctggatctttttaaagcttcttaggctgagccgggtgtggtggctcactcctataatcccagcactttgggatgccagggcggaaggatcacttgagcccaggaattttataccagcctgggcaacatagtgagaccctgtttctgcaaaacaaaaaattaaaaattagcggggcgtggtggtgcatgcctgtggtcccatccactagggagtctgaggcgggaggatcacttgagcccaggaggtcaaggctgcagtgagctatgattgcgcccctgcacttcatcctgggcaaaaaaggagaccctgtctcaaaaaataaaaaataaaaaaaggttaaatgtttctagaagcaaatctctggtttggtgcctaacatagtccagcatacagtaggcgctctatcttttgcccttaacccttctgagcctccccacccagatgctgtcctcaaaccctttgtcaaaagaggtgtctgggcagctggcgatgctcattccccaggcacagacttctgggaaggcagaggccagtggctggctgtacgggtgaggccttgggccgctgcagcccttggggacttggccagtgtccggaagctgtgggggctgggtggcatttgatgtcctggcaccagcactgtgactgggcaggctgtggcagttctcttatcgcccacgcccactgcacttgggtgggtcagccgtcacagccagcaaggctggcacccgaaggctgcctctcccaatcctggccttgtccaacagctcaattttcccaatttttcttccacaccattgccgcaacgttatctctgcttctcccagtacctgccaaggaaaaggcctgggttggctccagcagggcgttggtttgactcctggctgtgctcctcaccagctgtgtggcccgagcaagcaacctcagtgtgcccgtcgtgaaatgggatcacactaatggttagtggggattggagaagtttttgttttgttatttttatttgtttggttttggttttttagagacagtgttttctgtcatccaggctggagtgcagtggcgtgatcacagctcactgcagcctctgcctcccgggctcaagcgattctcccacctcagcctcctgagtagctgggaccacaggcatgcaccaccacacccagataatatagttattttttactttttattttctttcttttttttttttgagatggagtcttgctctgtcacccaggctagagtgcagtggcgcaatcttggcttgccacaacctctgcctcctgggttcaagtgattctcctgcctcagcctcccgagtagctgggactacaggcgcccaccactatgcccggctaattttttgtatttttagtagacatggggtttcaccacgttggacaggctggtctcaaactcctgacctcaagtaatctgcctgccttgacttcccaaagtgctgggattacaggtgtaagccactgcgcctggccaagttgaagactttggctgggtgtagtggctcatgcctgtagttcaagcactttgggaggctaaggcaggaggactgcttgaacccaggactttgagaccagcctgggcaacatagtgagaccccgtctctttaagaaaaatggaagagggtggtagcagagtcagaggaggacatggaacgacggaagcgaggtgggtttgatgtgattgctgtctttaaaaatggaagaagtggccaggagccaaggaatgtgggcggcctctagaaggtgaaacagacaaggaaacagattttcccctaaaatctccgaaagaaacagccctgcctacacatcgattgtagcccagtgagatgcattttgtgcttctgtcctcctgagctgtgagataataaatttgtggtttttatttattattattattattatttttgagacgagttttgctcttgttgcccaggctggagtgcagtgatgcgatcttggctcactgcaacctctgcttcctggtttcaagcaattctactgcctcagcctcctgagtagctggaattacaggtgcacaccaccacgcccagctaattttttgtatttttagtagagatggggtttcaccacgttggccacgctggtctgaagctcctgacctcaggtgatccacctgcctcggcctcccaaagtgcagggattacaggcatgagccaccgcacccgtccataaatttgtgtttttttaagccaccaaggcattggtgtcttgttacagcaacgaaaggaaataatgcatttgaccctcaaaccacatgggtgtgaggggcaccaaccccctgtgaaattagaaatctgtgtatgccttaagtttttgtagagacagggttgtgatctgttgatcaggctggtctccaactcctggcctcaagagatcctcccacctcagcctcccaaaatgctgggattgcaggcatgagtcaccatgcccggcctgcatataactgcatataagtcccccaaaacttaattagtgatagcctactgttgactcttagccttacggacaacatatcaacatacacatattgtgtctctgtattatatatatcgtattcttacaataaagtaagctgaagaaaagaaaatgtggctgggcgcggtggctcacgccgataatcccagcactttgggaggctgaggcgggcggatcacccgaggtcaggagtttgagaccaacctggccaacatggtgaaaccacgtctctattaaaaatacaaaaattagccggacatggtggtgcgtgcctgtaatcccaggtacttgggaggctgaggcaggagaatctcttgaacccgggaggtagaggtcacagtgagccaagattgcgccactgcactccagcctgggtgacagaatgagactccgtctcaaaaaaaaaaaaaaaaaagaagaagaaaagaaaagaaaatgttattaagttggtgcaaaagtaattgcgttttttttttttgccattccttttaagggaaaaaatattaaaatgtaaggaaaagaaaatacatttattatttattaagtggaagtggatcatcaaaaaggttttcagaggctgggcgtggtggctcacacctgtaatcatagcactttgggaggccaaggcaggtggatcatttgaggtcaggacttcaagacaagcctggccaacatggtgaaaatcctgtctctaccaaaaataaaaaaaaaaattaggggccaggtgcagtggctcatgcctgtaatcccagcactttgggaggccaaggtgggaggatcacttgaggtcaggagtttgagaccagcctggccaacatggtgaaaccccatttctactaaaaatacaaaaattagccaggcatggtggctcacacctgaagtccccgctactcgggaggctgaggcacaagagtcgcttaaacccgggaggcggaagttgccgtgagccgagatcacaccagtgcgctccagcctgggcaacagagggagactccgtctcaaaaaaaaaaaaaatggtcttcacattgagtgagctgaggaggaagaggaagaggaaggggaggggttggtcttgctgtctcaggggtaacagaggcagaagaaaaattgtgtttaaggggaaccatgaagctcaaacctgtgttgttggaaggttaactgtccaaacattgacttgggagctggacagcttgggtctgctgattgaaatctttcacaccatgggcaccttctttctctctaggcctcagttgatctgtctgtcaaatggggataatgataggaggtgctgtaaagatgaaatgaggcgggctggacatggtggctcacacctgtgatcccagcactttgggcggccaaagcgggattgcctgagccaaggatttagagaccagcctgggcaacatagcgaaaccctgtctctaccaaaaatacaaaaattagccgggcatggtgacatgtgccagctgaggtggaagatcacttgagccctggaggtcgtggctgcagtgagccaagatggtgccactgctttccagcctgggtgacagtgagaccctgtctccaaagaaaaaaaaaaaaaaggatgaaatgaggtgaaccatgtaacattttattattatgtttatttatttattgaaacagagtgaaactgtgttcaatatacacagtgagaaagacagggtctcattctgtttcccaggctggagtgcagtggggcaatctgagccctctgcaacctccgtctcccccggctcaaagattctctcacctcaggctcgcaagtagctgggactacaaaggcatgtcaccacgcccagttaatttttgtttttttgttttgttttgttttgttgtttttttagagacgaggtcttgcctgttgcttagtctgctcttgatctcctggactcaagtgatccacccaccttggcctcccaaagtgctaggattacaggattgagccaccatgtcctgtctctattttcacttttatttttagagaccgggacctggcatagtggctcacgcctgtaatcccagcactttcggaggctgaggtgggcggatcacctgaggtcaggagttcaagaccagcctggccaatatggtgaaaccctgtctctactaaaaatacaaaaactagctgggcatggtggtgggcgcctgtctcaaaaaaaaaaaatagagactgggtcttgctctgttgccaaggctgtagtacaatggtgctatcacagctcactgccgcctgtaactcctgggctccagtcatcctcccacctcagtctccctggtagctgggactacaggcacggaccaccacgcccagcttgttcttcttatcttttattttttatttttttgagatggagtcttgctctgtcgcccaggctggagtgcagtggcgcgatctcggctcactgcaagctccgcctcccgggttcatgccattctcctggctcagcctccttagtagctgagactacaggctctcgccaccacgcccggctaatttttgtatttttagtagagacggggtttcatcgtgttagccaggatggtcttgatctcctgacctcgtgatccgcccgcctggggctcccaaagtgctaggattacaggcatgagcaaccacgcccagcccttgttcttcttcttatcttgcagcattgttgcaaagatatagcgagttcccatcctgcggggtttagattaggctctcagggcagaaaccattagtatttgctgttcccctcccttcgtccccacccagctaaggttaataagagctaatggaacccatcacaagatattaccaatgttccctctttacagagagcccacaaagccaggccttgagccaagtgtatgccaggcacctctctctgcattttcagctccatctcacagaggagtaactcaagttcacacagctaggcatgtcccagctttaccattcatggcaccaaaccctcaggctccccaatcttttcctgagacagctgagactccctcatgtgttccctccccggtgcggccctgtcatgctcctgctcaaacaccctccatggctcccacgtactcatcaaacctagactgggaacggaccgctcaagtgactagcaaagcccttcccttttctgagcctcggttctctctcctataaaatgggttgatgaaatggcctccagtatggtggagaggatctgaaaggtagtgagttcgctttgctcaccactggctgtctctatgcagccgctcaccctctgccattctagctgacaccagaaacttccggtactcccttgtctctctgccttctggctttaccggtcttactgcctatctgatggtagaagtattctcttatgctttcccttcatacttgtaatagttttgagttttctgtgtttgcgtgattaatccatgtggaattttttttcttttagacagtttcactcttctcatccaggctggaagtgcagtggcgtgatctcggctcactgcaacctccgcctcccgggttcatgccattctcctgcctcaaactcccgagtagctgggactacaggcgcctgccaccatgcctggctaatttttttttttttttttttttgagacggagtctcgctctgttgcccaggctggagtgcagtgtcgtagtctcggtttacttcaagctccacctcccgggttcacgccattcttctgcctcagcctcccgagtagctgggactacagacacatgctgccacacccggctacttttttgtatttttagtagagatggggtttcaccatgttagccaggatggtctcgatctcctgaccttgtgatctccccgccttcgcctcccaaaagtgctgggtttacaggtgtaagccactgcgcccggcctttttttttttttttttttttttgagacggagtcgtgctctgttgcccaggctggagtgcagtggcgccatctcggctcactgcaagctccgcctccctggttcacgccattctcctgcctcagcctcccgagtagctgagactacaggtgtctgccaccacgcccggctaattttttgtatttttagtagagacggggtttcaccgtgttagccagaatggtctcgatctcctgacctcgtgttccggccatgctcgcctaatttttttgtgtattttagtagaggcagggtttcgccgtgttgcccaggctggtctcaaactcctgagctcaggcaatccgcctgcttcagcctcccaaagtgctaggattacaggcatgagccaccatgcctggccttttcttcctaatatacattcagggctactgaataaagaatttatcctttccctgtaaattctacatgtatcatgtatacaattctttttttttttttttttttttttggatacagggtcacactatgtcacccaggctgtagggcagtggcgcaatcacagctccctgaaacctgaacctgaacctcctgggctgacgtgatcctcccaccctaggcttccccagtagctgggactacaggcacatcatgcccggctagtttttaaaaattttggccgggcacagtggctcacatctgtaatcccagcactttgagaagccgaggcaggtgcgtcgctggaactcaagagttcgagaccagctgggcaacatggcaaagcccagtccctacaaaaaaatataaaaaattagccgggcgtggtgttgtgtgtctgtagtctcagccacttgggaggctgagggagatgggcttgagctcagggggtagaggttgcagtgagccgagatcatgacactgtactccagcctgggcaatacagccagaccatgtttcagaaaaaaaaaaaaaaagtgttttttttttttttaagcctcagagcctactttggctcaggaggctgctcgatttgcaatacaaaaaagaaaaaatatttttgtagagacgaggtctcaatatattgcccaggctagtgttgaactcctggagtcaagcaattctcttgccaaatgttgggattacaggcgtcagccactacgcctggcctgagattcatttaagtataaaattagcaaatctccgccggacgcagtggctcacacctgtaatcccagcacttccagaggccgaggcaggcggattgcctgagctcaggagttcgcgactagcctgggcaacacagtgaaacccccatctctactaaaatacaaaaaattagccaggcgtggtggcgtgcacctgtagtcccagctacttgggaggctgaggcaggagaatcgcttgaacctgggaggctgaggttgcagtgagccaagatcatgccactgcactccagcctgggtgacagagcgagactccgtctcaaaaaaaatctgcaaatctccaacctgggcaacatggtgaaatcctgtctctacaaaaaaaaatccaaaaataattagctgggtgcaatggtgtgtgggtagtcccagctactcgagaggctgaggtgggaggatcactcgagcccagcaggtggaggttgcagtgagccaagattgtttcaccacactccagactgggcaacagagtgaggctttgtctcaaaaacaaaaacaaaaaaaaaattactgggcgctgtggctcatgcctgtaatcccagcaccttgggaggctgaggtgggcggatcgcctgaggtcagcagttcgagaccagcctagcaaacatagtgaaaccccatctctactgaaaatacaaaaattagcctggcatagtggtgtgcgcctgtaattccagttacccgggggtgctgaggcagaagaatcacttgaacctggatgttgcagtgagccaagatcgggcaacagagcaagactccatctccaaaaaacaaacaaacaaacaaaaaacgcaaattaatttttaaaatatgtacccttagaaaattctaagctcgtttttattttcagtgttcactctacatacatgtattatatattgtggctattcattcaacaaatacttattaaatgtttgttttatgccaggggctatgctgtatactggggacgcagccggaatgaaagacacacaaatccctgtccttatgcaggcaataggcaagagggcagataattaacaaccaataagcaaatgtctaacatgtcagatggtgataagaagcaaaatgtatcacatctgtaatcccagggttttgggaggccgaggtgggaggaaggcttgagcccattgagcacaggagtttgagaccagccttgggcaacatagcgagacactggtctacaaaaaattttaaaattaggcaggcatggtggtgtgtgcctatagtcacagctacttgggaggctgaggcgagaagatcatttgagcctaggaggtttaggctgcagtgagctatgattgctccactgcattccaggctgagtgacaaagcaagactctatttgataataacaacaaagagaaagtcataggggtcaggtatagtggctcatgcctataatcccagcactttgggaggccaaggtgggcagatcacttgaggtcaggagttcgagaccagtagtagagacatggtaaaagccagtctctgctactaaaaatacaaaaatcagccaggcacgttggtgtgtgcctgtagtcccagctacttgggagcctgaggcaggagaactacttgaacccgggaggtggaggttgcagtgagcctagatggcaccactgcactccagcctgggcgacagagcgagactctgcctcaaaaaagaaaaaaaaaatgaaagaaagaaaagaaaaggtcataggacagagaggaaagggatggttgggtgtttttttttttttttttttggtttttgtgggttttcttttagatggagtcttgctctgtcacccaggctggagtacagtgccaggatcttggctcattgcagcctcgacctcttggtctcaggtgatcctcccacctccacctcccaagttgctgggactacaggtatgtgtcaccacacctggctaatttttaatttaatttatttatttttgagacggagtttcactcttgttgcccagactggagtgcaatggcatgatctcagcttgctgcaacctccgcttcccaggttcaagcgattctcgtgcctcagcctcccaagtagctgggactacaggcatgcaccacctcgccccggctaatttttgtagtaatagaaacagggtttctccatgttggtcaggctggtctggaactcccgacctcaggtgatctgcccaccttggcctcccaaagtgctgggattataggcgtgagccactgcgcctggcctcacctggctaatttttgtacttttagtagagatggggtttcacagtgttgcccaggctggtctcgaactactggcctccagtgatctgcctgtctcagcctccccaagtgctaagatgacaggcttgagccaccacgccttgccaaggtgatatttcaggcaaggcctgaaggcaacggagctgtatggatgtctgagagaagagcattctaagcagagggaccgagcagctagtgcaaaggccctgaggtcagaccatgcctgctgagcgtgggacgtacccaggaggccagtgaggctgaacagagtaagccatggagagagagagggaggaggtgagggcagggaggtgacagggcaggtcatgcaaggctttgtgggctgtggcgaagagctgggctttttcctcggaatgaggtgggaaccatggaggtttctgagcagagcagggatgtgtcctgacttaggtgtgcacagatgtctctggccgctatagtgaggatagaaagtgtctgtgttggtccaggcaggagatgacagggctgtgtgaaagggtgggtgcttgaggagcaggtgagaagaggttggattctggatagctctgaaggcaaaactgatctcaagcagagaggcagcccaggttcctggccagagcacgtgggaggatggagcggagtcatgggataatcagaagcttggacaggccaggcacggtggctcacacctataattacagcactttgggaggctgaggtgggaggatccctgaggccaggagttccagaccagcctgggcaacattgcgagaccctgtctctactaaaaatacaaaaaattacctgagtgtggtggcgcgtgcctgtgatcccagctactcaggaggctgaggtgggaggatcgcctgagcccaggaggtcaaagctacagtgagctgtgattatgccactgcattccagcctgggcgacagagtgagaccctgtctcaaaaacaaaaaagcttagatgccgccgcactgagtatgagatgctcacgtgtgttggggggagacagatgtcacataggtgtgcagctcagagacaagggtttccagagggcttaacttttgggactcctcagtgtggagctggtgggtggggcctgaataaattgtccccagggcaccctgtgtagttgggaagagaagaggcctgtggctcgctctctttgtccactgcttggaatgggtagggtgggaccagccagcctttgggctggcagagacttcgagaaccacagggcttctttaggagtctgggtcaccccagggcatgacctggcgcctcaggccttgcctgtggtccaggtgtttagacagggcccctctgctggtggctactaggaggagagggcgcctttttaaggataagttgagttagtgaccagagccctgcctgcgagtcctagagtctaaggcagcagctacaattattggacaccaaatgtatatgatcacgctgactgtataacctcatgctgtctgtgtacacccagcactaaatgtatattcctgctgaggatacctccacaccacctgtataatgccatgttaaccaaataattggctgcactataaatatctataaatattcaagtagaggcaggttgtggcgtggtgactcgtgcctgcaatcccagcactttgggaggttgaggtgggaggattgcttaaggccaggagtttgagcccagcctgggtaacacagtgagatcctgtctctatttttattgtattgtatttttttttttttttgaggcggagtctcgctctgtcgcccaggctggagtacagtggcataatctcggctcactgcaacctctacctcccaggttcaaacgattctcctacttcagcctccccagtagctgggattacaggtgcccaccaccacacctggctaatttttgtatttttagtacagacagggttttgccttgttggccaggctggtcttgaactcctgacctcagtgatctgcccgcctcggcctcccacagtgctgggattacaggcatgaaccaccacacccggctaatttttgatttattgattgattgattttttgagacactcgctctgtcacccaggctggagtgcagtggcacgatctcggctcattgcaacctccgcctctcgggttgaagtgattctcctgcctcagcctcccaagtagctgggactacaggtgcacaccacaacatccagctaatttttgtatttttagtacagacggggtttcaccaagttggccaggatggtctcgatctcttgacctcatgatccgcccacctcggcctcccaaagtgctgggattataggtgttagccaccacacccagcctattttcttttttctttttctttttggagacagagtctcactctgtcccccaggttggagtgcagtgaggcaatcttggctcactgcaacctccacctcctgggtttaagcgattctcctgcctcagcttcccaagtagctgggattacaggcatgtgccaccacactggctaatgtttgtatttttagtagagaaggggtttcaccatgttggccaggctggcttagaaatcctgatcgacctgcctcagcctcccagagtgctgggattacaggcatgagccactgcacctggcctatgcctgctctttgaggtcagttttggtttcatactttagcctcattttgcagttgaggaaactgaggcttaaggaagataagccctttgttaagtatcctctagttcagagggtgcagaaggagcatttgaattcagggcgacccaggaggatgtgggctccacaagggtggagattgggtctctctggttcctcactgtatgcggtgccccgcccaaggcctgcacccactaagggctgaataaatacttgttctaagaccaggcccagtagtgcacgcaggtaatcccagcactttggggggccacggtgggaggagcccacgagtccaggagttaaagatgagcctgggcaacatagcaacatcccatctctacaaaaaaaattaaaaattagccgagtgcagtagagcacctgtagtcccagctactcaggaggcttagtcaggaggatggcttgaggcagggaggtcgagactgcgatgagctgtgattgcaccactgcactccagcctgggcaacagagggagatcctgtctcaaaaaaaaaaagcagcagacagaaagaaaactaatttcctgcacagcttggagaagttttcagcaccaacattccacagttggttgtctgggtttgggcagtaggccgttttccctcccagtgcctcagtttccacacctgcaaaacgaagccacggaaacgccctttcagggtggccaggggttctaggcggcatcgcccggtggcagggtgttcccagggtgaagccgcagggttcccgggtgggggcggggaaggctaaatgcggccggccggtgagtggcgggagcagctgcagccccgcccgcgccctcccgggtcccttagtctgggcagctgcccagctcgggccggtctgaccggtttgggccgccccgcctggcgctgtgctgggaggagccgccgccagtcgcgcggtcagtgcctccctccagactcgggagggtcgagggggcgcgggagagagcgcgggcggccgccggggctggtcgcctgcagggatgggggacgagcggccccactactacgggaaacacggtaggcagcgacccccgcccgtagccccgggccgacccctcggtccctcggagggggccttgagagaacatggggcgcagggaagggggctggagggggagcgcaattgcaaatctgcgcctggagcctccccaccatcagccaggccccttcaccccacttatcccccgcagcctcgcagacgaccctccttactctcccctacccgaaggacctgcccctgtacccctctgcctggcactgctgccggcgcctccttccccctatcccacctcagatcttccccatctccacctggttccgtggtggtcaccatttcagccctcttcccagtgggtggccgccagttaataagtttgttcacagttagtgatccctccttcctcccctgtcctggcctgccagaactgggggcttgggtgtggtcacctggaggtgggtgaggcagaaaattccacaggtctctgaattttattcttgccaaggcaaagacacccctaggggcttttgggagggggctctcccagccctgtcttggttcaggtctccaatcccatccatcttaatcttcttgactttcaggaacgccacagaagtatgatcccactttcaaaggacccatttacaataggtaagagctctgggttttggggggttctccccgctaatactaccccaatccctgtctcttcacaccccctcccatctgttctccaacaaactggtgacaaatatttgaaacttttttttttttttgagatggagtcttgctctgtcaccaggctggagtgccgtggcgcgatctcaatctcggctcactgcaaccttcgcctcccgggttcgagcaattctcccacctcagtctcccaagtagctgggattacaggcttgcaccaccacacctggctaatttttttttttttttgtacttttagcagagatgtttcgctgtgttgcccatgctggtctcgacctcgtgagctcaaagcgatccacctgccttggcctcccaaagtgctgggattacaggtgtgagttaccacacctggcctggacttaatttttaccatgtttatatttatttatttatttatttatttttgagatggagtctcactctgtcacccaggctggagtggtgcaatctcagctcactgcaaccttcccctcctggttcaagcacgtcttctgtctcagcctctccagtagctgtgactactcagaggctactcagaaggctgaggcaggagaattgcttgaatctgggaggtggaggttgcagtaagctgagattgcgccactgcactccagcctggaggacaagagcgagactctgtctcaaaaaaaaataacaaaaaaataaaatacagccaggcacggtggctcacacctataatcccagcactttgggaggccaaggcaggtggatcacttgaggttaggagttcgagaccagcctggctaacatggtgaaaccctgtctctactaaaaatacaagaattagctgggcatggtggcgggcacctataatcccagctacttgggagactgaggcaggagaatcgcttgaacctgggaggtagaggttgcagtaagctgagatcgttccactgcactccagcctgggcgacagagtgagattccctctcaaaaaaaaaaaaaaagtctagcttgggcaacatagcgagaccttgtctctacagaatgtatataaattaaaaaaaaaatgtgtggtggtgtgcacctgtagtctcaactacttgggaagctgaggcaggaggatcacttgagcccaggagttcgaggctgtagtgagctatgatcatgccactgtactccagcctggatgacggagtgagactctgttgcacaaaattaaaaaatgaaatgaaataaaaattaaaatgcatgtgccctttggtacggcattcaaacgactcaggaaaatttgtccaaataacacatggatgagggtgtttgcagagggcagatgggcccatggtgcacacagcaccaagcctcctccaaacactgcccctctgctccccaggggctgcacggatatcatatgctgtgtgttcctgctcctggccattgtgggctacgtggctgtaggcatcataggtgagtagagaatgagcaggacttggagttgcagggtaggcggaggcagccatggcctctggagtgggaacagggctggatctgaggagtggcagtgtctcagtatccctggatctttccacagcctggactcatggagaccctcgaaaggtgatctaccccactgacagccggggcgagttctgcgggcagaagggcacaaaaaacgagtgagttgactccttgcggcctggtggggctggggaagagggggcagaagattctaggcattccccatctctctaagtccagttaacaagtgcttataggctgggcgcggtgactcacgcccgaaattccaacactttgggaggccgaggcaggaatattgctttaggctaggagttcgagaccagcctggccaacatggcaaaaccccgtctccactaaaaatacacaaattagccaggcatggtggcacatgcctgtaatcccagctactcaggaggctgaggcaggagaatcacttgaaccacaggaggcagaagttgcaatgagccgagatcgtgccactgcactttagcctggggcacagagtgagactctgtctcaaaacaaacaagcaaaaattaagtggacgtggtggggcacacctctagtcccagctacccagcaggctgaggtgggaggatagcttgagctgggaggccaaggctgcagtaaggtatgattgtaccattgcactccagcctggacgacagagcgagacctggtctcaacaaaacaacaagaaaagaaaacaagtactgataaacgtcccactaccctcagccactagtctagtccttggggacacacagctctaaatgagatagtaagcatcctgttctctggcagcacacattttaagggcgggagagactgagaggggacagtcctggattacgcgtcaggtggtgatgaacaggtgagacaacagagcaagcatagcctgagtggcgtcacttcctggctctgtgacctagggcaggtgtctcaatctctctgaacctcgttttcctcatctctaaaatgaggatcataacagtcccaccctcatggggctattttgatggttagatgtgccaatacatgtacagagcttagaatgccacctggcatcgctgggcgtggtggctcacacctgtaatcccagcacactttgggaggctgaggtgggaggatcaagaccagcctagtcaacatggtgaaaccccgtctctactaaaaatacaaaaaaattagctgggcattgtggcatgttcctgtaatcccggttactcaggaggctgaggcaggagaattgcttgaacctgggaggcagaggttgcaatgagccgagatcgtgccactgcactccagcctaggcaacagagcaagactccatctcaaaaaaaaaaaaaagaatggcacctggcatagagttgctgatgctgcagtttttaaactattattattattattattactattattattttgaaacggaattttgctcttgttacccaggctagagtgcagtggcacaatctcagcccactgcaacctccgtctcccgggttcaagcggttctcctgcctcagcctcccgagttgctgggattacaggcatatgccaccatgcccagctaatttttgtatttttagtagagacggggtttcatcatattggtcaggctggtctcgaactcctgacctcaggttatctgcctgccttggcttcccaaactgctggtattacgggtgtgagccaccacacccggcctattattattattactattattattattttgacacagtgtctcactctgtcagccagtggcaggatcatagctcgctacagcctggaactcctgggcttaagcgatcttcccacctgggccttccaaagtgctggcacaagacaggcctgagccaccctgcctggccctatataagatatctttttttttttttgagacagagtctcgctctgtcgcccaggctggagtgcaatggtgcgatcttggctcactgcaacctccgccacccaggttcaagcaattctcctgcctcagcctcctaagtagctgggattacaggtgcccgccaccacacccagctaattttttgtatttttagtacagacggggtttcgccacgttggccaggctggtctcgaactcctgacctcaggtgatccgcctgccttggcctccaaaagtgctgggattacaggtgtgagttactgcacccggccatataaaatatcttaaaggaaacaataggccgggcacggtggctcacgcctgtaatcccagtacttagggaggcccagactggaggattgcttgacaccagcctgggcaacatggtgaaattctgtcgctaccaataatagaaaaaattagccaggtgtggttgcgcacacccgtagtctcagctgctcaggaggatgaggtggaggatcacttgatcctaggaggtagaggctgcagtgagccaagattgtgccactgctcgctctgtctgggcaacagagaaagactcttgtctcaaaaaagaaaaaaaaacaaaagaggccgggcgcagtggctcacgcatataatcccaacactttgggaggctgaggcgggtggatcacctgaggtcaggagttcgagaccagtgtggccaacatggcaaaaccccgtctccactaaaaatacaaaaattagctgggcatcgtggcgggcacctacctgtagtcccagctactcgggaggctgaggcaggagaattgcttgaacccaggaggcggaggttgtagtgagcccacatcacaccattgcactccagcctaggcaacagagcaggactccatctaaaaaaaaaaaaaagagaaaaataaaaaaagttttctatagggtggttaagaagtcttaacaggtcgggtgtggtggcttacacctgtaataccaacactttgggaggccaaggcaggcggatcacctgaggtcaggagtttgagaccagcctggccaacatggtggaaaccccatctctactaaaaatacaaaaattagccgggcttggtagcgggcacctgtaatcccagctactcgggaggctgaggcaggagaattgcttgaacccgggaggcggaggttgcagtgagccgagatcacaccattgcactccatcctgggcaacaagagcgagactctgtctcaaaaaaaaaaaaaaatcttaacagtttccattctcccttctctaactccaggaacaaaccctatctgttttatttcaacattgtgaaatgtgccagccccctggttctgctggaattccaatgtcccactccccaggtaacctggtccccaccgttccctttttcctctccccgcttcccatccttttccccctgtgaatgtgggctgcgacctcagtcctgagcagtctgccccaactccacccaatcccttccttctcccctcccagatctgcgtggaaaaatgccccgaccgctacctcacgtacctgaatgctcgcagctcccgggactttgagtactataagcagttctgtgttcctggcttcaagaacaataaagtgagttgtagactgtcctgagagcacaggtatgggcagtggcagtgtactagacttggggactcacctccctccatctctcttggcagggagtggctgaggtgcttcaagatggtgactgccctgctgtcctcatccccagcaaaccctgtgagtcaggggatcccaggaggctcaggtggtgacggggaggctctgcagaggctcagcctgactggtgccatcctctgctccatgcagtggcccggagatgcttccccgctatccacgcctacaagggtgtcctgatggtgggcaatgagacgacctatgaggatgggcatggctcccggaaaaacatcacagacctggtggagggcgccaagtgaggatattggcgcaccgcgccagggtctcactttgctgggtgggacaggcaatcccctgtggttggcctgatcatggaagagggtctgacccgagccttgtcctccttcccccaggaaagccaatggagtcctagaggcgcggcaactcgccatgcgcatatttgaagattacaccgtctcttggtactggattatcatgtaagtcaggagggaaggggcctctcccctggctgccccctctaagcctggctgagggtggagtctgttcatgaccgttttcttttccccagaggcctggtcattgccatggcgatgagcctcctgttcatcatcctgcttcgcttcctggctggtattatggtctgggtgatgatcatcatggtgattctggtgctgggctacggtgcgtcaccccctccctgtggcttctctttcctgaatccgcacactgccctgccctttcccgtggaaatggcccatcaggaaaacaaaaaaaagtcaggccgggcgtggtggctcacgcctgtaatcccagcactttgggaggccgaggcaggcagatcacccgaggtcaggagttcaagaccagcctgaccaacatggagaaaccccgtctctactaaaaatacaaaatcagccgggcatggaggtgcatgcctgtaatcccagctactcaggaggctgaggcaggagaatcgcttgaacctgggaggcggaggttgtggtgagccgaaatcacgccattgcactccagcctgggcaacaagagcgaaactccatctcaaaaaaaaaaaaaaaagaaaaaatgtctcagcaccgtagttaaggatgcatactctggtatcagaatagcagaggttcaaatcctggctttgccaattctttgggcaagtgcctcaacctaactgtgcttcaatttctttcttttttttttttgagacggagttctgttcttgtcacccaggctggagtgccatggcgcgatcttggctcactgcaacctccgcctcctgggtccaagctattctcctgcctcagcctcccaagtagctgggattacaggcatgcacctccatgcccggctgatttcgtatttttagtagagatggggtttctccatgttggtcaggctggtctcgacctcctggcctcaggagatctgcccgcttcagcctcccaaagtgctaggattacaggcaggagccaccgcgcccggactgcttcaatttatttctctataaaatgagggtaattcatatttctagttggcaaactaaatgacaaggaggtaatgagcagataaaatatgggtaggggcctgtttagttcaggcctgtggaatccagaggcacaatatcgtgctcaacaaaacagtgcttcatattttggatttttgttgtttttgagttgttgttttgttgttgttgttgagacggagtcttgctttgtcacccaggctggcgtgcagtggtgcagtctcggctcactgcaatctctgcctcccgggttcaagcaattttcctacctcgcctcccgagtatctgggattacaggcgcacaccaccatgcccggctaattttttttgtatttttagtagagatggggttttaccatattggccaggctggtctcgacttcctcgtgatctgcctgcctcgacctcccaaagtgctgggattacagacgtgagccaccgcgcccagccttgatttgttttttgagacagagtctcactctgtcacccaggctggagttcagtggcacaatcacagctcactgcagccttgacctcctgggctcaagtgatcctcccgtcttggcctcccaagtagctgaaaccacaggcaagcaccatcatgcctggctaaatttttaatatttttgtagagacaggttctccctatgtggcccaggctagtcttgaactcctgagcttgagcagtcctcccgccttggcctccctaagtgttgggattacaggcgcaagccactgtgcctggcccatattttgattattccttgaactttcctggaagaaaaatgcttggcaatccaatttgaggacactcatagtaaaatattcatattaatagtggtttctagctgggtgcggtggcgcacgcctgtaatcccagcaatttgggagacagaggtgggcggatcacctgaggttgggagttcgagaccagcctgaccaacatgtagaaaccccatctctatttttttttttttttgagacagagtctctcactgtcgcccaggctggagtgcagtggcgcgatctcagctcactgcaacctccgcctcccgggttcaagcaattctcctacctcagtctcctgagtagctgagattactggcgcccaccaccacgcccagctaattttttttttttttttttttttttgtatttttagtagacacggggtttcaccatgttggtcaggctggtctcgaactcctgacctcgtgatccacccgtcttggcctcccaaagtgctgggattacaggcgtgagccaccgcgcccggccaaccccatctctattaaaaatacaaaattagccgggcatggtggcgcatgcctgtaatcccagctgctcgggaagctgaggcaggagaatcgcttgaacccgtgaagtggaggttgcggtgagccgagattgtgccattgaactccagcctgggcaacaagagtgaaactccgtctcaaaaaaaaaaaaaaagagagagaacttagaccatggcagcatatgattatgattccaagtagggggaaagggttctggaagttctcttctgaaggtgacacttgagcagagacctaaggatgtgtgggatccagccatggggagagaatgcaccgggcggtgggaactgcaagtgtaaagtccctgaggcagaagcctcgatgtttgcttctgttaaatgggggcagttgtagctgctttgcaaagttgcaggaggcactgctggactgagcttgtggttcccccatgcaggaatatttcactgctacatggagtactcccgactgcgtggtgaggccggctctgatgtctctttggtggacctcggctttcagacggatttccgggtgtacctgcacttacggcagacctggttggcctttagtgagtcacagtctcccattcctgcccccacatgaggccttggagggagtggggagcccagccggctcagcctttgccctttgcagtgatcattctgagtatccttgaagtcattatcatcttgctgctcatctttctccggaagagaattctcatcgcgattgcactcatcaaagaagccagcaggtggggggccagggtgccaggggccaggatggagctgtccctagagttgtgtcttttgccctgacgcctgtgtctctgctcttccctagggctgtgggatacgtcatgtgctccttgctctacccactggtcaccttcttcttgctgtgcctctgcatcgcctactgggccagcactgctgtgtatctgcccccagacactgatctctgaccccagggatggctaaagaccaactttgcctagaagtgacctgcagcttagggatagggctggaaactggtgggagaatggattctttcccacaaaagtccctggggtcctcagtcctagacctctgcttccttaacgaacctccagcttcctgtccacttccaacgaagcggtctataagatctttgatgacagcccctgcccatttactgcgaaaacctgcaacccagaggtgggcgtccccggggtggggagggcaggtattgccccagcaggccccagatgatttgaaacctctcatgtccacttggaggttcagcaaacaattggcccctgttgcatgtcctgtgctaggtgtgggggaggacgcacagtggggaagagactctctaactggatcgaacaacttcccagggcaagctggcttcctctcttcaacttgaccaggccttcaccctgggtgctaaatcacccatttttccctacttcctttttttttttttttttttttaataagacagagtcttgctctgtcaccaggctggagtgcagtggcatgatctcagctcactgcaacttccaactccctggttcaagcgattctcctgcctcagcctcccgagtagctgggattataggcacacaccagcacaccaggctaatttttgtatttttagtaaagacagggtttcaccatgttagccaggatggtctcgatctcctgacctcgtgatccacctgcctctgcctcccaaagtgctgggattacaggtgtgagccacctcgcccggcccatttttccccatttcatttcctgtctccatgccctcttcttgaccccagtgatggccacgtcttgtttctagaatcccttcctttgcacaagccatattctgaactcttaattccttcccttaacttcaatccctatgtctcctgtcctacctcatggttttcctggccccacacctgatgctcagagcccactgtgaacccctggtgcctctttttggactcggttctcccttctctcccacagaccttcccctcctccaatgagtcccgccaatgccccaatgcccgttgccagttcgccttctacggtggtgagtcgggctaccaccgggccctgctgggcctgcagatcttcaatgccttcatgttcttctggttggccaacttcgtgctggcgctgggccaggtcacgctggccggggcctttgcctcctactactgggccctgcgcaagccggacgacctgccggccttcccgctcttctctgcctttggccgggcgctcaggtgggctggcgttgcaggcaggatggggtggaggacgaggcctggcccagccaccgaccactccctcggcccgcaggtaccacacaggctccctggcctttggcgcgctcatcctggccattgtgcagatcatccgtgtgatactcgagtacctggatcagcggctgaaaggtacgtcccacccacggttcgcattagctcctgttgcggggcgaggctgaatagcgaaccaggattgggtcttgcttggaggtgggcggggccaagataatagagcagtgatgggtttctgtctatgacggggtggagttcaggagttggcgtgattgagtcctgcgatggaggagcaaaccagagaacctactgggtggaattcttgctgttgaggggacaggcccaagaggcctggcccaccattggttattaccagagtgaattggagtggtatatatttgcgctgaagagagcaggaataagactggtttattagccgggcgccgtgactcacgcctgtaatcccagcactttgggaggctgaggcgagcggatcacctgaggtcaggagaccagcctggccaacatggtgaaaccccgtctctactacaaatacaaaaattagccaggcatggtggtgtgtgcgtctgcagtcctagctacacgggaggctgagacaggagaatcacttgaactccggaggttgaggtttcagtgggccgagaccgagcgactgcactccagcctgggcaacagagcgagactccatttcaaaaaaaggaaaaaaaactggtttatttttcttagaggaagggctctggggctgggattgatggtactttgttttagagacaggatctctcaccctgtcacccaggctggagtgcagtggcaccatcatagctcactgcagcctcaaactcctgggcttaagtccctgtctctttgacagcgtggactcaggagacctggacattggcaagtgtgtgtgatagggaagaggggatcccttccaagtcaggctggtgtcccctcacttccacatcccttcccttctcttccagctgcagagaacaagtttgccaagtgcctcatgacctgtctcaaatgctgcttctggtgcctggagaagttcatcaaattccttaataggaatgcctacatcatggtgagtgggcctgggacccccaaccaacccgccagctcctgctgggtgagaggaccaccccccatgcccacccagtgggtctgatctctccctcccactctcctccagattgccatctacggcaccaatttctgcacctcggccaggaatgccttcttcctgctcatgagaaacatcatcaggtcgggaatcattatcatcttcctcctgccacccgcctcttcccctagtccctgaagccagcattcacacctgcccctcactgtcccctgcagagtggctgtcctggataaagttactgacttcctcttcctgttgggcaaacttctgatcgttggtagtgtgggtgagtgccgcccacctagcctctcggggtgtgggagcctgatttctgtcttctgtgatgagtgtcatcttcttaggaggctgtttcctatatccagaacccttcgccatcttgctttcttctccttctccagggatcctggctttcttcttcttcacccaccgtatcaggatcgtgcaggatacagcaccacccctcaattattactgggttcctatactggtatggacctctggggagagatgggggtttgggaagaaagaggtgttgggatttgcttggtcttctttgactagataaatgtggatagaggtcagaggtggggaattgattatttattcagaccacaaactttttgtttgtttttgaatcaagagtcttgccctgtcgccctgactggagtgcagtggtgcaatcttgactcactgcaacctctgccttccgggttcaagcgaattctcgagcttttgcctcccgagtagttgggattacaggtgcctgcccccacacctgcctaatttttgtatatttattttttaattttaatttaattttttttttgagacagactcactctgttgcccaggttggagtgcagtgaaatgatcttggcttactgaaaccttcacctctctagttcaagcgattcttgtgcctcagcctcctgtgtagctgggattacaggcacctgccaccacacctggctaacttttttttttttttgagatggagtttcactcttgttgcccaggctggagtgcaatagggtgatctcagctcactgcaacctccgcctcccaggtttaagtaattctcctgcctcagcctcccgagtagctgagattacaggcacgagccaccacgtgtggctaattttacatttttagtagagacggggtttctccatgttggtcaggctggtctcgaactcccgacctcaggtgatccacccgcctcagcttcccacagtgctgggattacaggcgtgaaccaccacacctggctaatttttgtatatttaatagagatggggtttcaccgtgttggctgggctggtctcaaactcctgacctcaagtgatccgcccgcctcgggctcgcagagtactgggattgcaggtgtgacccaccacgcccgacctcagaccacaaacattatcaagcacctactgtgtgtcaggcatcgaggtggagggcttccctctaaaggccttagagtttgggggtaaacagatactcctccataatgatattggtgaatgtatgattgcaaactgggacatgccacgagtatgtctgtatagcacagggaactgtttgaaactgtggtgggggctgggcaggtgtggggggggtccaggtggtgccatgcaggtgatgttggatctgagatctgaagctgcaggcaatatccaggcagagggaacagtacagtggccctgaggtgggagtgtgccaggaagcagtggggctgacgtggaaggagtaaagaagtggagataagggccaggcaccgtggctcacacctgtaatcccagcactttgggaggctgaggcaggtggatcacctgaggtcaggggtttgagactagccttgccagcatggcgaaacccagtctctacaaaaaaaatacaaaaattagcggggcgtggttgtgggcacctgtaatcccagctactcgggaggctgaggcaggagaactgcttgaacctgggaggcagaggtttcagtgagccgagatcgcgccactgcactcgagcctgggtgacagagtgagactctctctcaaaaaaaaaaaagtggagatacggccaaggaggttaacaaggctgtggagggattgagccttcattgcaagggcagtattgtatctcagtgtaggtcttgaagcccattgacctagtttcttattttagttcctctatttagtagttctaagatgagtaagagtaatcttgggcaaattatttaatcctctaaggtccactgacttttttttttttttttttttttctgcgatagagccttgctctgtcacccacgctggagtgcgatggagtgatctctgctcaccacaacctccacctcccgggttcaagcgattctcctgtctcagctccctgactagctgggattacaggcatatgccactgtgcccggctaatttttgtatttttagtagagacggggtttcaccctgttggtcaggctggtctcgaactcctgacctcaggtgatccacccacctcggccttccaaagtgctgccaataaaggcatgagcccctgtgcctggccatttcattgttttgaatttttaatttaatataatagagataggccaggtgttgtggctcaggctctactataataacaataataatagaggcagtgtctccctatattgccaggctggtcttgaactctggactcaagggatcctcctgcctcagcctgccaaagtgcaaggactacaggcatgagccaccacgcccagccaggtccactgacttcagtcaacaaatgtttatctagcagctaccaaggccgtgtgagtctccagattgctagggatgcagcagtaaatgggactgggtctagtgaggatgtgagcattaaacctgaaagccctaaacatgcataaaattgcagctgcaccaagagctcaggaggggtgcccagtgctaggaggacataaaataggctctagaggccgggcatggtggcccacacctgtaatcccagcactttgggaagccaaggcaggcggatcatgaacgtcaggagattgagaccatcctggctaacatggtgaaaccccatctctactaaaaatacaaaaaaattagtcaggtgtgctggtacgcacctgtagtcccagctactcaggaggctgaggtaagagaatcgcttgaacccgggaggtggaggttgcactgagccaaggtcccaccactgcactccagcctgggtgacagagcaagattccgtctcaggagggaaaaaaaaaaggctctcagccagacgcaggggcccacatgtataatcccagcactttgggaggccgaggcaggcagatcgcttgagctcaggagtttgaaaacagcctgggcaacatggcaaaaccccatctccacaaaaaaatacaaaaattagctgggtatgctggaacatgcctgtagtcccagctccttgtaagcctgaggtggaaggatcacttgagcctgggaggtcaaggctgcagtgagctgagatggggccactgcactctagcctgagcaacacagtgagaccctgtctcaaaaaaaaaacaaaaaaaaaacgcccactctaggtgtcgtaggtggtttcctggaggaggtgggacttgaggacttgctctttgagctgaaagcagaaggtcgatggggcataaattagatttaagtcaggacaatagcacatgcagaggcccaggggttaaagaaagcaagggtgaggctgagtgcagtggctcatacctgtagtcccagcacttggggaggccaaggtgggcgaatctcttaagcccaggatgggtaatgggtaacgtggcaaaaacccatctctacaaaaaatacaaaggttagccgggcacagtggtgcacatctgtaatcccaactactccggaggctgaggcgggaggatcacttgagcccaggaggcagaggttgcagtgagctgagattgcaccactacaatccagcctgggctacagagtgagaccgtgagaccctgtctcaaaaaaagaaaaaaaaaaaaggccgggtgtgcggtggctcacgcctgtaatcccagcactttgggaggctgcgaggcaggtggatcacctgaagtcaggcgtttgagaccagcctggccaacatggtgaaaccccgtctctactaaaaatacaaaaatgagccaggcgtggtggcacgtgcctgtagtcccagctcctccggaggctgaggcagaattgcttgaacctggaaggcagaggttgtagtgagccaagatcgtaccatggcactccagtctgggcaacagagtgagattccgtctcaaaaaaaaaaaaaaaagacggagagagagaaagaggattttgtgtggatggtggggccctgccagcgggggtgaggggttgggatgtcactaatccaaagagggtttctcagcaggggaaggatgtggtcccagcataggatggactcagggggtgggggctgctctgggaaggacacggagcagggacagctcgtttctccttgcccagacggtgatcgttggctcctacttgattgcacacggtttcttcagcgtctatggcatgtgtgtggacacgctgttcctctgcttctgtgagtgacccctcaccccaaaccttgctgggccccgaatcccttctttccactgggcatcacatcaccctccaacggggcaacacgcttgcctgcccccagcttccccagggcttggctgtccctcgtcctgggtccccagcctgtcttcctggtttccttttgcgcttagaagcagctccgacctcctgtccactggcccaggctgcagcctggacgctgccctggagcccgcccgcgcttcgcagtttctggctttgactggggggaggggatctgtggctgccactaactctggtctctccatctgttttttttgtttgtttttttcttctctcttcctctcctccatgcctgctggcttccctgttcttccctgcctccctctttccctcccttcccgaccaccccattttccccctgccggttcccggggggagcccaggtgaggacctggaaaggaatgacggctctcaggagcgaccctacttcatgtcgcccgagctgagagacatcctgttgaaggggagtgcggaggaggggaagcgggcagaagccgaggagtagagagtgagggagactggcgtgggggccaggtttcctccatgtagactgggggtgcatgaagcgggggggttcctggcctgcgagtgtggggatcctgtgtgtccctcggagcccactacagtctgcccctctctggtcccagtgtgtctgctttctaaccctctgaggcttctctgtgaccctcatccacctaccctgtccttgaggcccctgcccgtgggctcccctcatgcctcctgctctgggacctctctccacagtggaggacctggagaggaatgacggctcggccgagaggccttacttcatgtcttccaccctcaagaaactcttgaacaagaccaacaagaaggcagcggagtcctgaaggccccgtgctccccacctctcaaggagtctcatgccgcagggtgctcagtagctgggtctgttcccccagccccttgggctcacctgaagtcctatcactgccgctctgcccctccccatgagccagatcccaccagtttctggacgtggagagtctggggcatctccttcttatgccaaggggcgcttggagttttcatggctgcccctccagactgcgagaaacaagtaaaaacccattggggcctcttgatgtctgggatggcacgtggcccgacctccacaagctccctcatgcttcctgtcccccgcttacacgacaacgggccagaccacaggaaggacggtgtttgtgtctgagggagctgctggccacagtgaacacccacgtttattcctgcctgctccggccaggactgaaccccttctccacacctgaacagttggctcaagggccaccagaagcatttctttattattattattttttaacctggacatgcattaaagggtctattagctttctttccgtctgtctcaacagctgagatggggccgccaaggagtgccttccttttgctccctcctagctgggagtgacgggtgggagtgtgtgtgcccaggtgggggtgtctcctggctgggaaggagggaaagggagggagagttttgcgggggttggcagtggagagcaggctggagaggagatggctaatagctgtttaatggaaacctgctgggctggagggagttaggctgaatttcccgacttcctctgccagttattgacacagctctctttgtaagagaggaaagaaactaaacccacccaagggatgatgtcagggggagaggtggagggcagatgtcctgggcaaaccgggcccctctgcccacacacctcacttgatccttttgccaaacttgtcaaactcaggggaactggcttcccagttgcccctttgccatattccaagtccccctcagacttcatgtctctgctcatcagcactgtcccaggatcctggagagggagaactcctggccccaggggaaagaggggggggtctcccgtttcctgtgcctgcaccagccctgcccccattgcgtctgcacacccctgcgtgtaactgcattccaaccactaataaagtgcctattgtacaggtccaggcctggtgtgtttgttgggggcagtgagccagtggcggctggtagggggaaccccagcttccaaggccctaggagtctctgaactagggcgattctctcaaagggaacgaggagggggcaggaaacccactggctgctggctctgcctgaattccaaccttcaggcagctcagatttcccgattaggctctaatccctggactccagaaggcagaggcagcctgtccacctccgccatcacccatcctggacacacgcccccaggcctcccctctctcagggcccaggcacctgaggtcctgcagtcactatgctccccagctactttggatctgcgaagggactgactgcccttggggtgggccccactgcctggaagctcgctgctgccccctcgtgccagctgccagtgtcagtcacctccaggcaatccgccccaacatttcaattctttccacctcctctcagggaatttttcttcaatatccacttttttttttttttttttttttcagacagtcttgccctgtcacccagggtggagggcagtggtgcgatctcggctcactgcaacctccacctcccgggttccagcgattcttctgcctcagcctcccgagtagttgggattacaggtgcctgccaccacgcctggctaattttttgtgtttttagtagagaccaggtttcgccatgttgggcaggctggtctcaaattcctcacttcaggtgatccgctggcctcggcctcccaaagtgctgggattacaggcgtgagccacctggcccagccttttttttttttttttttttttgagacaggatctcactctggctgaagctaaagtgcagtggtgcaatcatggctcaccacagcctcaggtgatcctcccatcttagcctcccgagtagctgggactacaggtacacaccaccacacctgactaatttttgtattttttgtagagattgatttttaccatattgcccatgctggttttttttgtttgtttgtttgttttttgagacagagtctccctttgtggcccaggccacagtgcatagtgccacagtgcagtggcacagtctcagctcactaaacctcctggattcaagtgattctcgtgcctcagcctcctgagtagctgggattacaggcgcgtaccaccacatccagctaatttttgtagttttagtagagacggggtttcaccatgttggctagcctggtctcaaactcctgacctcatgtgatccacctgcctcggcctcccaaagtgctgggattacaggcatgagccaccaagcctggccagcatttttgtttgtttgtttccaagaaggcatttgaacccaggtcttggctccagagtcctcaagttctaccctatgctggcactgaccccttcctcgatgcctttgtttccctggatcctttgaatctggcattttattcagccccagctcctgttaccatgcccacctaaaaaatagctcctggcggccgggtgcggtggctcatgcctgtaatcccagcactttgggaggctgaggcgggtgaatcatgaggtcaggagtttgagaccagcctggccaacatggtgaaaacctgctgctactaaaaatacaaaaattagccaggcatggtggcacatgcctgtaatcccagctactcgggaggctgaggcaggagaatcgcttgaacccaggaggcagaggttgtggtgaaccaagatgacaccattgcactccagcctgggcaacagagcaaaactctgtctcagaaaaaaaaagaaagaaagaaaaagatttgtggtacgatacatatagcataaaatttgccatctccatctctttcttatttattaagccactgggtctcactatgttacctgggctggccttgagctcccggactgaagggatcatcccgcctcagcctcccaagtagctgggatgacaggcactcgccactgtgcctggtttatgtttaattttttgaggaaccaccatagtgttttctggcttcatgctttggctccacttctgggttggcttcactctctgccaagttcctttatctgggtatattccctgcctccaaccacactgtgctgtgatagttaattttaggtgtgaacttggctggattagaaaatactcagatttgagctgtgatgtggtaaaaataagacaaagaaaaaaaaaaaaacagtggctgggctccgtggctcacgcctgcaatcagcactttgggaggccgaggtgggcagatcgcttgagcttgaattcgagaccagcctgggcaacatgtggaaagcttgtctcaacaaaaactatgaaaattagcagggtgtggtggtcatgcacatgttgtcccagctactcagtaggatgaagtgagaaggtcactttagctcagggggtggagggtgcagtgagctgagatcacactactgtgctccagcctgagcgacagagcaacacgtctgataaagcattatttctgggtgagcgccatccaacttgctggggctccgacagaacagaaaaaggagagaaagcattttcctcctcagaactgggacactcttctcctcctgtcttgacactccaagacttataccagtgatccctggttctcaggccttcggccttggactgggaattacaccattggtgtccctggctctgaagctttaggattcagactgagcctcgctactggctttgcagggtcttcagctactggagctgctggcttttcagggtctgcagtcaatgcatgtggtaggacatctcagcctccatgatcacatgagccaattattctgctaaatcccctctcatctacctacctcctattagctttctcggagaaacctagtaatacacacatcatacattttcctggcctttttttttttttttttttttttttgagatggagtcttgctctgtcactcaggctggagtgcagtggcacgatctaggctcactgcaagctccgcctcccgggttcacgccattctcctgcctcagctcctgagtagctgggactacagctgcccgccaccacccccggctaatttttttgtatttttcgtagagacagggttttaccatgttagccaggatggtctcgatctcctgacctcatgatccgcctgccttggcctcccaacgtgctgggattacaggcatgagccaccgcacgcagctacattttcctggctttaagatgagaagtcttctctttttttgagacggagtctcgctctgtcgcccagcctggagtgcagtggcatgatcttggctcactgcaacctccgcttcctgggttcaagcaattctctgcctcagcctcccgagtagctgggattacaggagcccgccaccatgcccggctaatttttgtatttttagtagagatggagtttcaccatcttggccaggctgctcttgaactcttgaactcttgatccacccacctcggcctcccaaagtgttgggattagagggccagaaaagtcttttcttgctcctaagtctcaggcctggagctcactgactctgaccagcctgattatgatcatttactcattgtaaatcattgagtcaatcattgtagtcaaggtgtgggcctagtttgggagtcaggcagcagggacctgccatctagactacagtttgatcaagggagaggaatggttccccaacaactgtggtcatcccacagtgtccatcccagagtggtcacccatgtccaccctgggggggggcaagaagggaacaggcataggacaaaaagctttcgagagggaagttaactgggtgtgattgggagagtgggtggaatctttcaagatgaggaagacaatgaatagagaggctgtaaggacagcagagtcactgagagtgacaggacctgtctagactgacagattacaagagggggatgacctcaatcttcaaccaatgagtgggagggagggaagagagaaggaatagccagatgacagatgatgtcactaaggcaaggaggagagaatggtgttgtatacagggtttgtgaccactgagtggtggaaggacaagggcagaggtgcgaggtcgggtcagggtagcagttcagcaagacagggcagatggcatcttgtgtcttccatcctttacggtgaccagggactaggaacctgatggatggggtttattggaaagttgggctgaaaactttttacttcaaaaaatttttttctttttcctttttttttttttttgagacgaagtctcactcttgtcccccagtctggagtgcaatggtgcaatctcagctcactgcaacctccgcttcctgggttcaagtgattctcctgcctcagcctcccgagtagctgggattacaggtgcgtaccaccacgcccagctaattttttatattttaaggagagatggggtttcaccatgttggccaggctggtctcgaactcctgacctcaagtgatccacccgcctcggcctcccaaagtgctaggattagagggtgaaccaccacacctggccctttctttttttttttagacacagtctccctgtcacccaggctggactgtagtggcttgatctcggctcactgcaacctccacctcccaggttcaagcgattctcgtgcctcagcctcccgagtagctggaattacagatgccagccatcatgcccagctactttttgtacttttagtaaagacagagtttcaccatgttggccagggtggtcttgaactcctgacctcaagtgatccaccaatctcggcctcccaatgtgctaggattacaagtatgagccactgcccccagccttctttttgtttttattcttgaaaactttttttttttttaatgtagagatggggctgggtgcagtagctcatgcctgtaatcccagcactttgggaagccaaggtgggtggataacttgaggtcaggagtttgagaccagcctggccaacatggcaaaacccagtctctactaaaaatacaacaattagctgaccatggtggtgtacgcctgcaatcccagtgacttgggaggctaaggcagaattgcttaaactcgggaattggaggttgcagtaagctgagattgttatcactgcaccctagctgggactacagaacgagactccatctcaaaaataaataaatagatagatagataaaaaacatagagatggggtctcactatgttgcccagactggtcttgaacttctgggctcaagcaatccccctgcctcagcctcccaaagtgtaggattacaggcatgagccagcatgcctggccaagacaacatttttcaggaagttctggttggatggggcacccgttcaagaggtaacaatcataaccattactgtttttgaagctttaactccatgccaggtactgaagcaaccccttgatgttgaattaactccgaatcagtcctcctccaaatcaaaccctaggaggtttgggtttgatccaaagactgtgcttgtcatcatgaccctatccgccctttactgtgtttggggtccctggggcaagaaacgccttagcggaatgagatcttcaaaagcgttttaagtaaccttaggctctctggagttgggagtcagaaaactagtaaccatcctcgttctgccatttggcagtgctgttagctcaagcaagtcactaaaactgacctgttccgaaaaaaagccagtctaggctttgttattaacattcgttattatcacagtgaccttcaacaatttaaagctttaaccaattttttggttttgtttttgtttttttgagacagggcttctgttgcctaggctagagagcagtggcccaatctcagttcactgcagcctcaacctcctgggctcaaatgatcctcccacctcagcctcctgagtagctgggactacaggtgtgttccaccatgccctggcattttaaccaattttatcttagtgcatgccccaatcatcttaccaaacctttcttcaatttccagctctatttgtgagacagatctgaggcacaggaaatgaaattaaaaagcctggtgcagaataacttatcaatttatgtgaaaaacaagaatatgattatgcacctctgaaaataaaactctactgtagttacacaaaaaactgtacaatggctggtcgcggtggctcacgcatataatcctagcactttgggaggccgaggcgggtggatcacgaggtcaggagatcgagaccatcctgactcacccggtgaaacccagtctctactaaaaatacaaaacattagccgggcgtggtggtgggcgcctgtagtctcagctactcgggaggctgaggcaggagaatggcgtgaacccaggaggcggagcttgcagtgagccaagatcgtgccactgcactccagcctgggagacagagcaagactccgtttcaaaaacaaaaaacaaaaaacaaaactgtacaatggcttctaagagggagggaactggatgtctgaggaagactttgtgctctcatgtctttggcacttttttttttttttgagatggagtctcactctgtcgcccagactggagtgcaatggcacgatctcagctcactgcaacctctgcctcccgagttcatgccatcctcctgcctcagcctcccgagtcgctgagactacagatgcccaccaccacgcccggctaatttttttttgtatttttagtagagacggggtttcactgtgttagccaggatggtcttgatctcctgacctcgtgatccgcccacttcagcctcccaaagtgctggaattacaggcgtgagccaccgcgcccggcgtctttggcacatttgacgtatcatgtgactatgctacctattaaaaatccacagtaaaatgtaaataaaatagaaaagcagagggtacagcatgcactcatttcttttttgagacggtctagctgtgccatccaggctgaaaagtgcagtgactccatcacggctcactgcagcctggacctccacagctcaagtgatcctcccacctactcctcccaagtagatggaactatggacacaggccatcacgctcagctaatttttgtagagactgggttttgccatgttgctcaagctggcctcaaactcctgggcttaagggatcctccagcctcggcctcccaaagtgtggggattacaggcgtgagccaccatgcccggctaggcactcatttctgtaattgttgcaggaaacaaaggaccagagagactgacacgggaaacaggaggatttatttagatgtacaccggctcagtggatttgtatctgaaaagctgaccattgaacaaagactgagtgtggtttttataggcaaacttacagaagcaaaacaaaagcagttaatgatacagtcacaggtcatgtaatctatagcataactgctgacttagcataacttgtggctttgcacagctgttggccttgcagctgtgtcaaaagaaaaacagagtctacaaatcttactaaatacaaccattggcaaacagtcatatttaatggttcagaaaaggagagacagtaaaggaatttttcttttcaactttgctccggaggaggctgtctggagcccattcctttggcctcgacttttcagtgttataactgtccttgaagtaagctggctaagcagaggaaaacttgttcttgttttctttttaacccttaccccctgccacataatcacatctttacacttcttttttttttttttttttttttttaagatgggaagtcggagtctcgctctgtcgcccaggctggagtgcagtggtgccatctcggctcattgtaacctctgcctcccaggttcaagtgattcaagccattcttgtgcctctgcctcctgagtagctgggattataggcgcacaccaccacacctggcgaatttttttttttttttttttttgaggctgagtctcactctatcgcccaggctggagtgcaatggagcaatctcggctcactgcaacctccgcctcctgggttcaagcgatcctcctgtctcagcttcctgattagctgggattacaggcgccctccaccacacccagttaatttttctatttttagtggagacggtgtttcaccatgttggccaggctggtctcaaactcctgacctcaagtgatccgcccacctcagcttcccaaagtgctgggattacaagcgtgagccaccacgcccagccaggaaacccattttcaacacctccttgctcttttttttttctgagacagagtctcgctctgtcgcccagactggagtgcagtggcgcaatctcggctcactgcaacctccgcctgccaggtcaaacaattctcctgcctcagcctcccaagtaggtgggactacaggcatgtgccaccacacccggctaattttcttttgtatttttagtagagacggggtttcaccatgctggccaggctggtctcgaactcctgacctcgtgatccgcccgcctcggcctcccaaagtgctgggattacaaacgtgagccaccgcgcctggccttccttgctcttcttgctccaaatcctgggaacgtctgaatcaacaggcggacatctgtcaaaccttcctagcaactacgcctgcggatggccaacctgaccctggaagacagtggggtttagttaagcacagattgtacatcgggggcctcataaggcgcctggaagcattcaagaacaccacgcttgtaaggacaaagcactcggtcacgggcgcctttacttcggagctccgcgctgctgctggacgagcgtccgttgagtcccagccccaatttttccaggaaatggcggtgagccctctagtgagatattttttggcctgggcctcagtttctccatctgtcaatgggggaaggggaaggcgggctagaggaccccgaccaggtcggctgcagccttcggaagctacggcccagggacgccacaccaaggcaggtctgcgggacgaaagaacccaagaacccgggcgcgcattggcgccggtcccgggctcaaggggcagcaacgaggagacgctggacctggccgttcctcgcacacatctctaaccttctgtgcctctcaagggagatggggtgagcatagccacctccactggagcccgaaaatccccggccgagataccgccactaaaaaggtacacatgcgtcaaagcctctcggagccatttccgctaacgtactcagggcgacgggcgtaagatggcggccgcgcaggcgcaaaatgtcgcagccgtagggaggctccgcctctgacgcttgccttgcatcacgtggtaatggccgctcaaaaaacgccttagcgaaaaccagagcgtgccctcgtcacgtgatggaggactcccagtacggcaaagggaaggcgccaaaagttgtcagatggcgaaggaaaccgcgaaattcgccattgtcacatgatggagcaacctatcgaaagcggagggaaaggtgccgaagtcacgtgactacgcacgcaaacactcccgcttgcaccacgtgcaactcacgcccaccccctcagccccccccttatctcttttcgcccctccctcccatttgggttgggcctgcgtcgaggcgcaacgcggcgtcaaagggggcggggcttcagccggtcacgtgttcccgcacctccccggcgcgcgcctgcccgcccgcccgctcgcccccggtccggactcctcctcctcctcttctcgccattgcagttggacccagcagcccggcgcgcaccgcgtggcttttgggggcagaccccggcgggctgtggcaggagggcggcggcggcggctgcggtcgaagaaggggacgccgacaaggtaagcgtcaatgtggcggcggccgggcccgctcccgcctctgcccctccccccgcccgccctcagtgagatccccactgagggttcgcggtgacaaggctggagggatcccacgctcgccgcctccgcccggttccctcatcccggcgcctggcccgttcctcccttgccggcctcgctcccgcgctcggccgttaactctcttccattgtgcggaggaaacaaaatggcggctgcggcggcggcgaggactcggtgcgcgcgcagccgctcccccccgcacgcggcccctcggccggcggcggcgccacgcgcgggggggtgcgcgcgcaccgggcccccggctgccgcctccccgcggctgggcttttgtctgttgcgggggtcctggggacgcgcgcacgtgcttggagcacacaccccctcgggtcccgagttccgcggcggggcgaccccccttcctcactccttccctaccccctcctcctctttgtcccggtcccgcccccgattccaggagagtcccaggttcccgaggcgggaaaagtcgcctcctttgtcctcacaggtcgcggagaggcggaccccctccttggaagccccttcccacgcggattgctgaggaagcctttgtgggttcgtcgggtttccaaatctctggtcagccaggcctctctcagatcagggtcaaaacttgagagggtttcagctttttctttagttagtttgttttcattgttgaatgtttttccagattgttagtatttgccttctctagaccggcaatctacttgggtgcaagcctgggccccgaaacgtggatgcttaaaacccatttctacctttattttctcaagtagttgaacgattgagattctcgaggttactcatgaggttctgccccagttaattcaccgcctggatgaattatttggggtgtacggcggtctgcatgctcctcccccagttcagtggccaaatttgaggagaatgagggatctcttctccacatttccaacattgtttgccagttgctgcttaggtgacatggatcagcaacgaagcgtcggtttcagtggtttctttttctggactccggtaattcactgctgctgaatctttttcaagattttgctctctttaaaatgagtggtgtgatggcatatttgtggtccacatggaatcgcgaggtgccatccgaagttaggattcaaatttaggactttaagctctcttttcctcaggtatttgtggatgggaatctccatggattgctcagagtgctgccactgtcccttgtgcgtgatgctttgtgtgtggtctcgtgggatgtagttacagtagccgcccagactgtgaatgaagtgtgggaaccagggcctcattcacagctggaaagcaggaggaggccgcaggacattggcaggtgctcctctccctgttccgtggtgctggggccccttgcttatgtgggtggctcttggtccctgggatttgtgaatggagtctgcaggccccagtgttgtctggaatattctttagttcagattggaggctagcaatgactgccaggcttggccttgccgccactgggcgctatttatcactctccctatcttcctggagcttagccgagtcttcctggagctgagaggtgcctaattgtttgtggtttttctgattgaacttgtttggtgcctctaggcaaaaattcctttggctccttctagtattttcagggtcttgaaggcccatattcctgagcatgaggaatctaagtctgttattttttcctaaattttcatgttaaataccacgttgacaaaggacagctgctaatattttgatcacacagatacagacggtgctccctggttaaggcctccaggtaggggacaggtagagtcagtgatggggaagaagccttctgtaagtccctttcctttgggtagacagtagattaccctttaggctttagcaagatgtgggggttagaagtcttctattcttggaaaagcctttagtcgttttctttgggctggggcctcttctcttagggactgctgtcaccctttctcggtttcttttgattacctttcatggccccagaggagtgatcccttcccttatttatacctcttggacttgtcatcctgctacattttgtcagcaagttaattcaccttgtgcagttttgaaagatgtgtaagtgttaacatttagtattagcatttatggcccaggaaattgtgaccttaatatttgaatcttgcttttattaaacctttacaggaactaggattttgtagggttttttttttttttttttttttgagttagagtttagctcttgttgcccaggctggagtgcaatggcgcgatctcggctcaccgcaacctccacctcccgagttcaagcgattctcctgcctcagcctcccgagtagctggaattacaggcatgctccactacacctagctaattttgcatttttactagagatggggcttctccatgttggtcaggctggtctcgaactccgaacctcaggtgatccaccggcctcggtctcccagagttgtgggattacaggcgtgagccaccatgcccagccttctaggttctgtttattggatgctttttatcttaacaaagtcctggcagagaaagatttgatttgtttccatcaggaagtttggaatctgaggcagatagtggtttgagtgtcatcttcacacaatgaatgagtagagatttggggcctgggaggcacgaggcaaactttagtttcctactgaagcatttgtccgttttatctgaaacaagtagattgccgatctgtattattatacatagtaagctgctgttgaaatggttgtgaaagtagagtaggcaggtaggtggtggttagggggcctcatcggtgctgatttttaagaaatttttatgatatttatgatctgttataaatccttgtgaaacttttccatgagaacacttcacgggtgattccattatgaatagcaattggtggccgggtgcggtggctcacgcctgtaatcccagcactttgggaggctgaggtgggcggatcacgacgtcaggagttcgagaccagcctgaccagcatggtgaaaccccgtatctactaaaaaaaaaaagtacaaaattagccaggtacggtggcacacacctgcagtcccagctattcgggaggctgaggcagcgaatcgcttgtacgtaggaggcggaggttgcagtgagctgaggtcgtgccgctgcactccagcctgtgtgatggagcaagacttcgtatgaaaaaaaaataataacaattggaaattcagatacatttagcatcagctgtatttaggcatcgtgtaaaagtgatgtccagttaaaatttaatttaatttttttttttgagacagggtctcactctgtcacccaggctggagtgcagtcgcgtgatctccgctcactgcagcctctgtctctgaggctcaagaagcaatcctcccacctcagcctcccaagtagctggaaccacaggcacatgtcaccacacccagctaattttttgaattttttgtagagacaggatctttccacgttgcccaggctggcctcagaactcttgggctcaagcaatctgcccaccttggcctcccaaaaagctggaattactggagtgagccctcactcctggccagaatttaccttttttctcttctcattaaatgtttacgtagtgaagacattgaaaatgtagctactagttttttttaaatttttaatctaattttatttttttgtagagatagggtcttaaactatgttgcccaggctggtctcaaattcctaggctcaagtgatcctcctgcagcctctcaaagtgctgggattacagatatgagccgccttgcccagtggcactaattttaagacaaaaatatgtttactgtctgagggccattctcttgtggaatgcgtgatcaccatgtatcatttagtcataaagttgaatgtattacagtatgcaaatttgctccaaattatttttataattttaagtgatagtaagaagttctggccaggcgcggtggctcaggcctgtaatcccagaactttgggaggccgaggcgggcggatcacaaggtcaggagatcgagaccatcctggctaacccggtgaaaccccgtctctcttaaaaaatacaaaaaaattagccgggcgtggtggcgggtgcctgcaatcccagctgctgaggaggctgaggcaggagaatggcgtgaacccgggaagcggagcttacagtgagcagagattgtgccactgtactccagcctgggcgacagcaagattctgtctcaaaaaaaaaaaaaaaagttctactttgcagtgtgaagtacataattttcactgaacatgcccaacagctgtccttatcttttcgaggattttgcttgaagctgaaggttaaggtcttacttagataaagataaaaggtcttggagatgagtaagtcttccaggccactttcttttctgctgcttgcctataaaactagtttctcatatcagagtgttgtttttttttttttttgagatggagtctcacagtgtcacctaggctggagtgcagtggcacggtctcggcttactgcaacctccgcctcctgggttcaagtgtttctcttgcctcatttctcttgcctcagcctcccaagtagctggaattacaggcacctgccgtcacgcccagctaattttttgtatttttagtagagatgaggtttcaccattttgctcgggctagtctcgaatacctgacctcaagtgatctgctgcctcagtctcccaaagtgcaggaattacaggtgtgagtcacaacgccggttctaattttttttttttttttttttttttttgagatgagtctcgctcagtcgcccaggctagagtgcagtggcgcggcttactgcaagctccgcctcccgggttcatgccattctcctgcctctgcctcccaagtagctgggactacaggcacccgccactacgcccggctaatttttttgtatttttagtagagacggggtttcaccatattagccaggatggtctcaatctcttgacctcgtgatccgcctgtctcggcctcccagagtgctgggattacaggcgtgagccgccgtgcccggccaatttttgtatttttatatagagactgagttttcgccgtgttggctagggctatcttgaactggcgtcactcaagtgatttgcctgcctcggcctctcaaagtgttgggattacaggcataagccaccatacctgacctgcagttatttcaaagtaaaaaggttttactaaacagttaacatgtttggatgttagtatttaatgtccatgtgagagatggtctttttaaaaaaaaatcttaactggaaaaatacagttctgggagaagtaaacattgaactgtatactaagtttaaaaaaaataatccaaggcttcgctctgggaatacatggggaaggattgcttctgcctccacccagatatgggaggatctctcaaccatgcttcccttgcccccctgctgcctgagagcatgctggaaagagggtttgataattcccacttgaagtcatgttgaatgtttttctatggtggcagattttaaagcatttctgttggttcatccaagagcagttaatgtttttcttttttttttcctaaggactggctctcactatgttgtccaggccggtcttgaacttctgggctcaacgaatcttcctgcctcggtctcccgagtagctggtactacaggcattcacaactgtacccaatttaatcctcttcatacattgcatttgtagtattgtagttcacaaaacatttccccatagtgccacctttaatccttgctgtctgcagcctgaggcaggtggtattttcatcctcatttttcacccaccaccagaaaggtaagtgatttgctgtaggtcccaaagctgccaggttggagagcccaggggcaaattccaggcttctgactctaggactgtgggcactccacaacactagtgagcctggagtcccgggtctccagaaacatttgaggaacaacttgtatttgccaacttttttttatgagatggagtctcactctgtcgcctaggctagagtgcagtggtgtgctgtcggctcactgcagcctccgcctcctgggttcaagcgattctcccgcctcagcttcctgagtagctgggattacaggcgcccgcccccacacccggctaatttttgcatttttagtggagatagggttttgccatgttggccaggctgatcttgaactcctgacctcgtgatctgcctgccctggcctcccaaagtgctgggattacaggtgtgagccaccatgcccggctgtatttgccaactttttattttgtcaaggaaaatatctttaaattagtgatcattcaccatttccgtttttcataattagcaagattgtctttatcaccaaaactataggaataaaataaaggacagtcctttaagttgaaaatatttactaaaatctttatttctggctgggcgcggtggttcacgcctataatcccagcactttgggaggccgaggctggcggatcacttgaggtcaggagttggagaccatcctggccaacatggtgaaatcccgtctgtactaaaaatacaaaaattagccaggaatggtggtctgtggctgtaatcccagttactcagtagagtgaggcagaagaattgcttgaacccacgaggcggaagttgcagttgagctgagatcacgccactgcactccagcctgggtgacagagcaagactctgtctcaaagagaaaaaaaaaaaaagctctttgatataataatactgttgcagtctgaactatgaaccattgcactggacttcacatttttaaatatttcagaatggcattgatagcaagattttagactggcattgcctcgctcggttgcttgctttttttttttttttgagacggagttttgctcttgttgcccaggctggagtgcaatggcgcgatctcggctcactgcaacctccatctcgcgggttcaagcgattctcctgcctcagcctcccgaggagctgggattacaggcatgcaccaccacaccgggctaattttgtatttttagtagagatggagtttctccaagttggtcaggccggtctggaactcccaacctcaggtgatccacccgcctcagcctcccaaagtggtgggattacaggtgggagccactgtgcccggccggttgctttctaagaataattttcaatgtgcccttgatggcgtgactctgtcaaagttcaaggagtcaccaagactcctagctcaagtgtatcatttcagctcacagcccaggatgggccagctccagaggtcaggaaaccaggaggtgggttgagtctctgaatttcagagcctaatttggtctctctcaagtgaatatccacttcaggaccattccctagagttgctgggaaggctgtaagacttatgaaataccccgaagacaggtggggccatacctgtgagggtgttgccactgtacctgtccattccacaaacatctgttcatccactcatgctgaactaacttgggcatgtttcttttccaacaagtgccatgaacctcatagtgtaattagtgagaggtcagaaagatggccattgcaccacaaacataatgttttgtggttgaagcttctgtaactgcatgttgtgggtgggctggattcaggaacaaaagaaaaatgaatccctgtgtgttaaaccatcccaaaccaccaagaagtcatgtttaaaatcccaatacttcatttaccacttgatcctgccttgggtttgttttcagagaagctgcatgttgctggtgcccaggattgaatcataaaaattgtaagaataggctttgctggtgccaggtttgaataaatgtggttgcaagaacagcattgttcatcgtttcgcagctttcgtttaaagttagattagtaggggcagcggagtgttgcgtgtgggtgggtgctgtaggcttattgccagcagtgtgcctcactaaatatcctcttgaaagggaagtttctgctcaccctgaagactgctggatcagttagtgagacaaattccaagaagctggcttggatgtcaaattggtcttgggctcatagagaggaatggatttgttgccctgaaaaggagcgataactctagtttttaaacatttgttttagttcagataattactgcccttattcattgtgtccacctgagtcagaaagcattgctgctgttgcctggtctaagggaggaggacccaggcatgtaacggactgcatgctggccagttgtggtggtcagagcaagctggaggccagcgaggcccttcaggggtcttttcaagggtctgccttggggagcagaggaagatgaagtgaggcagtcgttatagcaagggcacacccacgtttctcattttgaacagtgaagaaagcagatggaaagccacatgtagggcatttgctgaagacaggtgtgttgggggcgtgtgtgtgtcctctgaggcattttgggtggggcgatattttgaccgaatgataccttgttcttcagtgcttcaatggttgatggggtggctttttttcgagatggagtctctctctgtcatccagactgcagtgcagtggcgcgatctcggcttactgcaggctccgcctcttgggttcacgccattctcctgcctcagcctccctgagtagctgggactacaggcacctgccaccacgcctggctaatttttttgcattttttttgagatggagtctcgctctgtcgcccgggctggagtgcagtggcgcgatctcggctcactgtaacctccgcctcccgggttcaagcaattctcctgcctcagcctcctgagtagctgggattacagacgcctgccaccacgcccagctaatttttgtatttttggtagaggtggggtttcaccatgtgggtaggctggtctcgaacccctgacctcgtgatccacccgcctcagcctcccaaagtgctgggatcacaggcgtgagccactgctcccgtccaatttttttgtatttttagtagagaggggtttcaacgtgttagccaggatgctatcgatctcctgacctcatgatccaccagcctcagcctcccaaagtgctgggattacaggtgtgtgccactgtgcctgatagtggggtgattttctacttctaactctctaatgtgtcacatggctttttttaatagattgtctgtatcaactgggggtgaactttagtcttttaacaattttcagactatgaagtttggatgtaaacacctctaatgtgggaagttagttttttttaaagtatctgtatggagttatggatatatataaatttaatgtgttgaatctgttttattttagtaacatcttttgaaaatgttcaaacatagaaaaaagggtgatacaattttagtgaacacttaggccgggggcagtggctcactgcctgtaatcccagcactttgggaggccgaggtgggcagatcatttgaggtcaggagtttgagaccagcctggccaacatgttgaaacccccgtctctactaaaaatacaaaagttagcctggcatggtggtaggtgcctgtaatcccagctatccgggaagctgaggcaggagaatcacttgaacctgggaggcggaggttgcagtgagccgagatcgcgccactccgctccagcctgggcaacacagtgagagtccgtttcaaaaataataataataaaaaatttaagctgggcgcagtggctcaacgcctttgtaattccagcactttgggaggccgaggcaggcagatcacttgaggtcaggagttcgagaccagcctgacaaatgtgatgaaaccccgtctctactaaaaatacaaaaaaaaattagccaggtgtggtggtgcatgtctgtaatcccagctacttgggaggctgaggcaggacagtctcttgaacctgggaggcagaggttgcagtgaaccgagatcgtgctgttgcactccagcctgggcaacaagagttaaactgcacttcaaaatataataataataaaataaaaaatttaatgaacacctacctgtatgcacagcctaggttttgctgtgggcatttaactgcttgtgtttcacatatttgtccatccacttataattcttttcacttttcactttattgattgatcagagacagggttacacttttgttgcccaggctggagtgcagtggtacagtcatagctcagtgccatctcaaactcctgtgcttaagcagtcctcgcgtctcagcctcccaaagtgttggggttataggcgtgaaccactatgcctggccaaatatatgtatatatatttttgtatatatttttttaaattttatttttgttttttattttatttttatattttgagacagagtcttgctctgtcgcccaggctggagtgcaatggcgcgatctcagctcactgcagcctcagcctccctggttccaacgattcttctgccttagcctcctgggtagctgggattacaggtgcactccactacgcccagctaatttttgtatttttagtagagacagggtttcaccatgttggtcaggctggtctcgaactcctgacctcaggtgatccacccacctttggcctcccaaagtgttggtattacaggtgtgagccactgcgcctggccactttattttgatgatgcatttcaaactaagtagcaggaagttgcaagtcttccctctacatattattaactagaatttaatatttatttacagttcttttttggggtggcgggggtcagggtctcacacactttttttgcccaggctggagtgcagtagcacagtcttggcttactgcagcctccatctcctgggctcaagtgatcctcctccctcagcctcctgagtagctgaaattaacggcaggtgccaccatacctggctaattttttttttctttttttttaagaaggagtttcgctcttgttgcccaggctggagtgcaatggtgtgatctcggctcactgcaacctccgcctcctgggttcaagcgattctcctgcctcagcctcccgagtagctgggactacaggcacgtgccaccaatgcccagctaattttgtatttttaatagagacggggttttgccgtgttggttaggctggtctcaaactcccgacctcaggtgatccacctgcctcagcctcccaaagtgctgggattccaggcatgagccaccgcgccctgcctacctggctaatttaaaaaaaaatttttttggagaccaggtctgattatgttgcccaagttggcctcgaactactgtgctcaagtgccttggcctcccaaagtgctgtgataacaggcgtgagccactgctcctgcctcactttatttttatgatgcatttccaactaaataacagaaagttctaatcttccctctacatactaacaagaatttagtatttatttgcagctaggtttttatttttttctttaaaaattttttttgtagattcactcaggctggtcttgaactcctgacaagtgctgctcccaacgtggtgagccaccatgcccagcctcttttttctttttaaataatgcacagatctttagtataccagtcagtgaattctggccactgcatatacccaactcttgtcaggagggagaatgtaaccttcatctcagaaagcttgggagggccccttcccatgtgatccctaccaccgttccccagaggctgtcccatcactgattagtttcgcttattctagaactttatgtaggtggaagcatgattctttttgaatttgttccaaatgtagccagtgggacacctcacaagtcagctccgatgtcctcaggacaagactgctatagtcaccagtgctttgttgctttctggcgctccggtaggatccaggctcacttggtatatcccctgctgcagattacggtccacttctcccgggagctgctttcagtaggtttttgttgttgttatatttttgtttatttatttatttcgagacattctcttgctgtgtcaggtaggctggagttcagtggtgcaatctcggctcatggcagtctcctccccagttcaaggaggtcaaggagttcaagaccagcctggtgaacatagtgaaaccctgtccctactaaaaatacaaaaattcgccgggtgtggcgacacacacctgtagtcccagctactagggaggctgagacaggagaattgcctgaaactggcaggcagagattacagtgagccgagatcacaccactgcattccagcctgggcgacagagcaagactctctcaaaaaaacaaaaagtgttggctttgcatcgtggctcacacctgtaatcccagcactttgggagactgaactgggaggatcacttgagcccaggagtttgagaccagcccacgcaacatggcagcaacccatctctacaaataattaagaacaaaaaatctattatggaatttttaaaacatgcacaaaagaattacagtatccatcacccagcttcaacagctgtcagtgttctacagtcttgtttcatccttctctactttcctttttttttttttttggagacggagtcttgctctgtcgcccaggctggagtgcagtggcacgatctcggctcactcactgcaagctctgcctcccgggatcatgccattctcctgcctcagcctccctatagctgggactacaggcacccaccaccatgcctggctaattttttgtatttttagtagagacgaggtttcaccgtgttagccaggatggtctcgatctcctgacttcgtgatccgcccgccttggcctcccaaagtgctgggattacaggcgtgagccaccacgcccggcctcatccttctctactttctgctccctggtatatttcagagcaaataccaggtatataattttagccataaatttgtcttaaatatgtgtggaacagttaaagttggttctttccagcacaaccacagtattattcccctaactgaagtaactataattccttcataaggattcacttcatgaacaagattcccagtgtcgttgcgactatccagggaaaccatagccaagggaacaggcttggcagaatcagtggcgaaagaaggccctgtggagcttgactctggctcggtgaagagacatgggtgatggaggagaggatgccctttgcacacacatcactcacgcctggccctcattgcagcctgggaaggcagatttttttcaacagtaggatctagtaccaattgttaggtctatgggatatgtgctgcatgcttcaagtaggttgacttgtttcattttcctagtcctgccgagagtagaggggcctcttccgtgttgctaatgcaagaaggaagctagtggctgggcaagtggggtttcaggtccaagtctgtgcagaagctttccttgggcgatcgatcgagtggcttgccccatggtgtgagtctcaggcatgttgagccactgagcccagggactggctttctgcccttttcatcccatgccccctcacactccttccctcctgcatccctaccctgacatgaagcctttgacctcaccatgtcctgttgctgggctttgcaggggcatcatttgactcctaggggttttttgttttgttttgttttaaatgagacagagttttgctcttgtcacccaggctggagtgcaatggtgtgatctcgactcaccgtaacctccgcctcccaggttcaagcaattctcaggcctcagcctcctgaatagctaggattacaagcatgtgctaccacacccgactcattttttgtatatttaatagagacagggtttcaccatgttggccaggctgatcttgaactcgcgacctcaggtgatgcctctgcctcggcctccctaaagtgttgggattacaggcgtgagccaccgcgcctggtgacccctaggttttatttatttatttattgagacggagtctcgctctgtcacccagggtggagtgcagtggcgcgatctcagctcactgcaacctctgcctcccgggttcaagtgattcttctgcctcagcctcctgagtagctgagacaacaggcatgtgccaccacacccggctaattttttgtatttttagtaaagatggggtttcacagtgttagccaggatggtctcgatttcttgacctcgtgatctgcctgccttggcctcccaaagtgctgggattacaggcatgagccaccgcacctggccggttttatttatttattcatttattttttttgaggtggagactctatttgccacgcaggagtgcagtggcgcaatctcagctcactgcaacctctgcctcccggtttcacgctgttctgcctcagcctccctagtagctgggatgacaggtgcacgccaccacatctgtctaatttttgtatttttaggagagatgtggtttctccatgttagcccagctagtctctaactcctgacctcaagtgatccacccaccttggcctcccaaagtgctgggattacaggcgtgagccacctcgctcaagcacccttaggttttaaagtttaaccttggggtgtttaaattttgcagttagatttgctaggtagtcctgggtattttgggaagttcttgttttggcagcatgtcagactttatccttgatgcttgggcctttcaggtttgagcctgctctgctggctcggaactagtttagtcggaaggggctggcagttgcctgtagggggtagattcatctggtgtgtattatgctgatggggttttttggttgtttactcatttggaagatttcagtatggaccagactgtttgtgtagagtgggaattgagtaggttggagtcggcatgattctgagaccgaaatagtaattatggcttcgtttgtcctgaaggattctgtcgtgcacttcagttgtctcagcctcttcagagttgaacgtgatgtggttgtcatcgtccacctgatatttcaaatgttcacttttcgggaggttctttctttttcattttacagaagccttttgggaccctttgtcatatgtctttcttccttccacctcttcattaccatcagaggtcagagctccttccctctcttttccttccccaagcaccaagattttgatgtgaacatctttttttttttgttttttttttttgagatgaagtcttgctctgtcacccatgctggagtgcagtggtgtgatctctgctcactgcagcctccgcctcctgggctcaagcgatacttgtgcctcagcctcccgagtagccgggactacaggtgcccaccacgcccggctaatttttgtatttttagtagagatggggttttacagcgttggccaggctggtcttgaactcctgacctcaagtgatccacccatctcagcctcccgaagtggcaggattacaggcgtgagccactgtgcctagcatgatgtgaacatttctacctgtagtgttttttggagagctgttaatattttcatacttgtaaaaatgggcatatttatgtaaaggaagataaaagaagtaaaataccatctgagtggcttgtgggcctgaagtcagttctggcttctagaaaccatctgttttcatttttagggtgttacgtagttaatgccttggcttagcagtggttacttggaaataaagatgtgtcctgctgtgttgacaggcccttcatgaggcagcacacatgtcattcttgctactgtgtacctagctgctgaaatgaatcctataaattatatgaaactaaaaagattttctgatcttatagagttgaagtattgataacaccaaggaactctatcacaatttgaaaagataagcaaaagtttgatttccagacactacagaagaagtaaaaatggtaagtttgtttttgatcacagatactgtttcttcactcatgtacagagatgtttgtagccttttccaaagcatttgcttccattaccatttttattagcccttttggattataaagcaatattatctattctgtattccattctgatagtgtaggaacgaagtcagtgccccattactcccactgcccagagacaacagcttttcagtttgcttgtccctccttggttcttcagttgtgctcctgcaggctttgcttttacacacgagcgatatagcatcattctgaattgtgcagcttaaaagatgaacgttgggctgcttgctctctttacatcatttttaacttaattctcacatccctagcgtccaatgcgaatttttgtgaatgatgaccgccatgtgatggcaaagcattcttccgtttatccaacacaagaggagctggaggcagtccagaacatggtgtcccacacggagcgggcgctcaaagctgtgtccgactggatagacgagcaggaaaagggtagcagcgagcaggcagagtccgataacatggatgtgcccccagaggacgacagtaaagaaggggctgggtaagtgaggttttccgttgtccttttcttttttgtagggtagccagggtagaggttggcacctgttttctaagaaactccagcctctctggggacctctgggttgtggtcagactgaattcctcactgagctgggtgttggtctgtccctcagggaacagaagacggagcacatgaccagaaccctgcggggagtgatgcgggtgggcctggtggcaaagggcctcctactcaagggggacttggatctggagctggtgctgctgtgtaaggagaagcccacaaccgccctcctggacaaggtggccgacaacctggccatccagcttgctgtaagtgtggccaccactgccgggtaggtgggtgggggggtggtaggcatgctgattgaggatgtggggcccaggaagaagtgtcctgctaggctgtgctccaagaagcacatgccacacttgccctggcacttgctgtgcgtgtgccttctcagtaggtgacaaccaggacaccaccaagccacagagattctgtggaacctgactgcaggggtcataaggaccccgtgcctattgtgtgccaggctgcaccagcccgaggtcattgggcataaacttcacgtctaggctccattggatggatggctagatagatagcagagttgttatctcttccattggatccaaagctgaatgtaaagaattttttttttcttttgggacggagtctcgctctgttgcccaggcctagagtgcagtggctcgatctcagctcactgcaacctctgcctctgaggtagacaattttcctacctcagactcccaagtagctaggattacaggcatgcaccactacacccagctaatttttatatttttagtatagacagggtttcactatgttggtcaggctgtcctcttaactcctgacctcaggtgattcatccacctcagcctcccaaagtgctgggatcacaggcatgagccacctcgcccagctgaaaatcttttctatatgtttattttttattttataaatagagatgggttcttgctatattgccctggctggattcaaactcttgccctcaagcagtcctcctgtccccagcctcccacagtgctgggattagaagtgtgagccaccacaaacaatttttttttttttttttttttttgagatggagtcttactctgttgcccaggctggagtgcagtggtgcagtctcggctcactgcaacctctgcctcctgagttcaagcgattctcctgccttagcctcccgagtagctggtattacaggcacatgccactacgtccagctaatttttgtatttttagtagagatggggtttcgccacgttggccagagtggtcttgaactcatgacctcaaatgacccgcccacctcggcctcccaaagtgctgggattacaagcatgagccaccacgcctggccgtttttatttttttaagatgaggaaggtttcgctctgtagcccaggctggagtgtggttgcgcaattatggttcactgcaacctccacttccagggctcaggtgatcctcccattgcagccccctgagtagctaggactacagtcatgtactaccaccccgagctaaaagatcttttaaaaaaaaaaaaaacatttatttgtttcattgtgaaagtattgcgtaaataatggcttctgtttattgagtgtttgctaaagtcaggccctcagccagatgtgctcttcatgtgtgttatttcatcctcctctaagtgggacagatgatgtgacagagctgcagggcagctgaggagtggatcccaagacccacggctgggctgtttggaggcatcagaacctctgccagctgttgcctcctcaggacacagtccccctgaatttatttataggataagcaaaaaagaagtgtacaatcatctataaatctttgacagagtcttgctctgtcatccaggctggagtgcagtggcctgatctggggtcactgcaacctctgcctccctggctcaagtgtttctcccacctcagcttcccaagtagctgggactacaggtgtgtgctaccacacccagctattttttgtattgtctgtgtgtatgtgtgtgtgtagatacgaggttttcccatgttgcctaggcagttcttgaactcttgatgacaggcctgagccaccacagcctttgaatctttgaatcttattccttggaaagaaaaacctgatttactttcacaatgcagatttgtgttctttcacatgggactgacgattttgggttcaggacaaagatcaggattaaaatacggagctaatgtaaatgcattagatacttctgcggagctattgtagatgaagctgtgaaatttttctagtgacaattttctttttttttctcctgaaggtacatcagcatagaggtaattccttttcttttttgaaacagtcttgctctgtcacccaggctggagtgctgtggtgcgatgttggcttactgcagcctccgcctcctgggttcaagtgaatctcctgcttcagcctcctgagtagctgggattatgggtgcccgctgccatgtccagctaatttttgcatttttagtagagaccatgttggccaggctggtctcgaactcctgacctcaggtattatgcccgtctctgcctcccaatagttctgggattacaggcgtgagccactgtgtccggcccatagtggtaattttttggcagaggggggtgtgggggcgggacagagtttcgctgttgttgcccaggctggagtgcagtggggcgatctcagctcactgcaacccccgcctcccgggttcaagcgattctcctgcctcagcctcctgagtagctgggattggaggcatgccccaccacgcccagctactttcatgtttttagtagagatgggttttctccatgttggtcaggctggtctcgaactcccgacctcaggtggtctgcccgtcttggcctcccaaagtgctgggattacaggcgtgaaccactgcgcccgtccatagtagtaattcttaaattaactttattcttgtctctatctagcaaggatattaagtgaagtaaattgtcataaatgtttctacagtaaaaacatttgtgagaaaccattccttttttttttttttttttttttggaggtggagtctcgctgtgtcgcccaggctggagtgcagtggcgccatcttggttcactgcaagctccgcctcctgggttcacaccattctcctgcctcagcctcccgagtagctgggactacaggcacctgccaccacgcccagctaattttttgtatttttcgtagcatctctggtctttaccaggtgaagtttcatctgtgttagccaagatggtctcgatctcctgacctttttttttttttttttttttttttttaagggaggcaaggtctcttgctctgttgcccaggcttgggtacagtggtgcaatcacagctcactgcagcctcaagcaatcctcccacctcagcctcctgagtatctgggaccgcaagcatgtgccaccatgtctggctaatttttaaaattttttgtacatacgaggtttcattatgttgtcctggctggttttgagctcctggccttaagctatttgcttgcctcagcctcccaaagtgctgggattacaggcatgtgccattgagcctggccaataattattccttaaagatgaaaataataggtatttttaaaatcattttcagtggttccttaagaggggtgaatcactctcctcccctgataacatttggtagtgtctgttgacaatgcggtgttggggtgctgtggtgctgtcagcacctgataggtgaagaccagagatgaacaccctatcatgtgcagagtagtccccccaaccaagaattatccagcccagaaggtcagttgtactgaggttgagaaatcctgtttcagatttttcaatgtatttattctcctcccaacatatttacttaacttccttcagcttgaattttcttctttctttgttttgttttttttttttttttttttttgagactgtgtcttgctctgtcccccaggctggagtgcagtggcacagtctcagctcactgtagcctccgcctccccgcctcagcctcccaagtagctgggattacagggcctgccaccgtgccgggctattttttatatttttagtaaagacaggatttcacaatattggtcaggctggtctcgaactcctgacctcaagtgacccacccacctcggcctctcaaagtgctgggattacaggtgcgagccactaccctcagccaaaagcttgaattttctttgtcaagtcataagaaggtggtatcaagaatgaaaatagtcgtgagtgtccttgtagatgtgcatttgcagcaagtacatacgtttagatgcaccataggatactgcacactgactgtttcactgcacacagggtttattctacactggctgctcatcccagcatggaagtagcagtggctggatgcccactctgcagtgtccaccgctttccccgcagcgtctgtttgaggcttccagcagccttgtggtgtagttcgtgtcattaagtccattatacagattagagtctgtatgagagtgatttatccaaagttgatcaactactaaagggcaaaaggggggtctcctcctcctggctcctggatccgaaactctttgccattggtttttttttggagactgagtctcactcttgtcacccaggctggaatgtagtggcgcgatctcagctcactgcagcatctgcctccctggtttaagcgagtctcctccttcagtcttctgagtatctgggactacacgcttccactgcacccagctaatttttgtatttttagtagggatggggtttcaccatgttggccaggttgatcttgaactcctgacctgacctcagctgatctgcccactcagcctcccaaagtgctgggattacaggcgtgagccacctcacctggcctaacattgcttttttgtttgtttgtttttttttttttttttttttttttttggtttttttttttttgagacagagtctcgctctgttgcccaggctggagtgcagtggcatgatcttgcctcactgcaagctctgccttccgggttcacgccattctcctgcctcagcctcctgagtagctgggactacaggcacccgccaccacgcccagctagtttttttgtatttttagtagagatgggatttcaccctgttagccaggatggtctcgatctcctgaccttgtgatccgcccacctcagcctcctaaagtgctgggattacaggcgtgagccactgcacctggcctaacattgcttttttgtttgtttgttgttttgtttttgtttttgtttttgagatagagtctcgctctgtcgcccaggctggagtgcagtggtgtgatctcagctcactgcaagctccgcctcccgtgttcacgccattctcctgcctcagcctcccgagtagctgggactacaggtgcctgctaccacgcccggctagttttttgtatttttagtagagatggtgtttcaccgggttatccaggatggtctcgatctcctgacctcgtgatccactcacctcggactcccaaagtgctgggattgcaggcatgagccacggctcccagccctaccattgcatttttaagcaccgtttggaaatcgcttctttcactagttatccctctttcaagtacccaaaacgtggccaaagacctggccaattagagagaccctgacatcccaggtgaaatcacttccgggtcatcatactcaagacgttggcctttctgttgcaggaataggtggagccagataaaattgttgattgctttgaggagaaagtgttttgaaagttgcattttattttttaggctgtaacagaagacaagtacgaaatactgcaatctgtcgacgatgctgcgattgtgataaaaaacacaaaagagcctccattgtccctgaccatccacctgacatcccctgttgtcagagaagaaatggagaaagtattagctggaggtagggaggccgagacacgccggcaggactttgaaaatgtggtgttccctcactattcaaatgtgctattcagttttagactgctttggtatacggtgtagattgaccacctttactctgagatcacatctcccgttggctttgagtacttgggagtttgacaaaacagtcgcactaaaagtgagtagcacttttcataggggactgcaccattttcctttatcttcatccttgaacgttctcaaacatgaatgtggaagttgcttttctatggagccattctctggctgtggagaagtgtccctggtgattccatggttttaaagatgagacaaccagatggtttctgcatgagcaccacgttggagtttaccaacagcctgtgctgcagctgagctgagggcctcttcgtttgtcctctgtcatggctcttttatcatttaaagtgacagaagcacaaagagctgatacagagttttggataaagttttaaactgttgtccaatttttcaaaccacatcattggacctcacgctaataatgtgctcgcagtccatggcccgccgctcgcatgcctgtcttcaggccttatccaaacccctggtgtgcagatggcagagaagataaacgctctgcttggccgcagcataggctggcatagcgcccttgttgctgtttacctttggttctcatagctgattccgactaccaaagcccttctagttgatcaacgtagggacgctggacctttgaccaacaggactctctctgtcaagggctggggctagggcagtcccgcctggtgggcggagttggtcccctttgctgcagatgccttgggatggctgttgtgtgatgcagagagggagttcatttcctctccctcggcctttttaaattttttcctattgaacattttagcatagctaatttattgggagaacatggggaggaggcaagggaagaggattagaagataggctccacctatctctcccctccctcatgagattattccttttagaataactccccacttttgtttttatgtttgttttattttttctttttctttcttttttctttttctttttatttttggagggggcctccaatttttacaatttcctcacagggcagagttgaatgtgctctagtttctccttccctggtccagggtggagatgaattcagcttctgggaaactcagctgccctttagaaagctgccacatcccctttccacctgacagaaaccccttggtcaaactgtgccttgtcttcttattccatccatgaatagaaacgctatcagtcaacgaccccccggacgttctggacaggcagaaatgccttgctgccttggcgtccctccgacacgccaagtggttccaggtttgcattttgttcttctatttgtcttttggtagagaattcctaagttttaacttggctaactgtcaccataaagattccttaacattgacgatagccgtgccgagcttagcacctgcagctgcgcaggtcctaaaggagtgcacctcaacaaattcgaccccaaaagaggctgagactgagttggtgggctgctgctgctgctgctgctttgtgttaagagtaacactctcttgtacacgtagtgacattgcggctggccacagccttggtggtcgccagtgttgactgtttacccttggcaaagcagcaacctgacacttgtgtcgttcatgttgacttgtgccctgggcggtgcctcagactgaagagcctgtgttttgttcccctaggccagagccaacgggctgaagtcttgtgtcattgtgatccgggtcttgagggacctgtgcactcgcgtgcccacctggggtcccctccgaggctgggtaaggcatgttgctgtggctactgggggtggtgtgtgcagagtcttttggatatcccaggaacacttgatggtcacggggcaggagtggcctcttgacgcgtggctggtgtgtactctccagagctgcctgtggagctgctcctgcttgccacacctggggttggggttggggcagtgtgggtcggggccctctgcagggtcgcacagctcaatcccaggagtgggggctgaccaggaggtgggaatgatccctctgggaaggtttgtagatagtctcacgcaggaccagtttttggcagttgcacccttttttttttcagcttgcagttgaggtggtttttatatttgtaaataaatggttagattttaagtaagaagtactacatcataaccttagcttggtctctgagctcacacagcctgctaggatgtcatgtctggtccttgaaggcccctgtcctagatgccctggctcaggcttagccctgaggctttgactttacccgactggttggctatgagtcccacgtgtgccccgacccactcatgcagtgacagctccccagtggcggccggccccatcctgtaggctcttggctcactgtccctcttccctttcagcctctcgagctcctgtgtgagaaatccattggcacggccaacagaccgatgggtgctggcgaggccctgcggagagtgctggagtgcctggcgtcgggcatcgtgatgccaggttggggccttgtgctttgcaggttgcagggaaaggacagggttccaggccgcctcctggcgggtacactgactgggttaggacagcagcagccccgtgtccaccccctagagctgaagcatgtgactaccctctggcaccatcatatccagccctgaccgggtccgcagccgtcattcagagggcggatccggggcagtggtgacccactcccacgtgactttcttgctctgagacacttgtgaattatttctgtcaagggctggacgccgagtgggtcaccgagctaggcatgttttccagagctgggtgtggatggggcgcggggggtaacacacctagttccctcagccagcacacctcttcagagatgctaaaagataatcctctgcatatcttccttgtttcctgccttcagatggttctggcatttatgacccttgtgaaaaagaagccactgatgctattgggcatctagacagacagcaacgggaagatatcacacagagtgcgcaggtatagtcatcgccattgccaacgtgcgccctgacccagtctgtaatcactggcttccagttccattactgggtattcccagggtagcccctggactcgtaggctcaggtcggggactgaaggcaaaaggattgtgtctgatacagggcgccccaatctgggctgcttctttcccctggtgccatgcgtggttttcatctgccccctcccttggcttgctcgagtgccgttttcagacactgtgagtggtgctgggagatgtgtttgctgtgcggactgctccggggggaccttcccctgcaggcccccacatggctccgtgtggcaaccagtccccaggttggggtctcctgtattcctttggaaggggggtggtcacaggctggccttcccccacagcaaggctgggcttgagcagtcaggctctcccctggctggtgggggaccccttgctgtcgtaagggagaccattagcagcccttcagctctgcccctcctcagaaggcagtagtgagcacacactccatggccgggagcacagggcagctgagtcagagcctcttccccttctccagcacgcactgcggctcgctgccttcggccagctccataaagtcctaggcatggaccctctgccttccaagatgcccaagaaaccaaagaatgaaaacccagtggactacaccggtaagcctgcggcggttgcctgatggctggggctccaggaagagtcaccatctgcatctcccagccatgccctggtctctccttgcagttcagatcccaccaagcaccacctatgccattacgcccatgaaacgcccaatggaggaggacggggaggagaagtcgcccagcaaaaagaagaagaagattcagaagaaaggtacaggccgggcgcggtggctcacgcctgtaatcccagcactttgggaggccgaggcgggagaatcgcttgagctcaggagttttgagaccatcagcctgggcaacatggcgaaaccccgtctctacaaaaaatacaaaaattagctgggtgtggtggcgcacctgtagtgccagctacttgggaggctgagatgggaggatggcttgagcctgggaggcggaggttgcagtgagcaactgtactccagcctgggcaacagagcgagaccttgcttaaaatcagtgttgaaaaattttagaagctaaataggtaaaaaagcaggaaggtgcagacctccactagtgctgctgctttatccatctggtcctgtgaaggctcaccctgaagctatgggatggctgcttttgtttcatttttctcacttgtgatttctgagtccttttaacaatgatgaggcatgattggggatgtggaagatgagtaggatggtggtgctacagctggaggccacaggagaggtgcaagctgggctcagtttgtgtggctgccccacccactgtgttacgccacagaggcagccctgggggttaggattggcagagctctcgtggagacctgccatcgtgctgatccagagccaccttgctattctctctgtagaggagaaggcagagcccccccaggctatgaatgccctgatgcggttgaaccagctgaagccagggctgcagtacaagctggtgtcccagactgggcccgtccatgcccccatctttaccatgtctgtggaggttgatggcaattcattcgaggcctctgggccctccaaaaagacggccaagctgcacgtggccgttaaggtgagtgtggccagcatcactgtcttctaatagcagaaccatggtctttgttttgggccccttctgagccattgtctctcagggagggcatgtagattctaaaaatacacatggttagatggcgagtatttgccaagtcacgtggcaagaacgccttcccactgtggctggcaggcagaggggtccccaaacatgattggggcattagggcctcctgggagcaggagctgaaaggaaacagccctcctccagatggcttcccgggtgggtgcctgtaggccatgaggaggccctgcatgcagccctgcttcactgggaccttgggggtcttgccacctctgcaggtgttacaggacatgggcttgccgacgggtgctgaaggcagggactcgagcaagggggaggactcggctgaggagaccgaggcgaagccagcagtggtggcccctgccccagtggtagaagctgtctccacccctagtgcggcctttccctcagatgccactgccgaggtgagcacatggtgggcgctgggagtgactgcctggacagagcaggcagccatgtgtcctgtcagtgaggtggttactggtccttgttaatttgccccaaaaagtggacctttcaggccagaagtccgcacaggaagctgggtgctgccctccgagccgtgtcggggagggccttgtggatgttgtcccagcatcctataggctacactggggtggccttgggttgataacgtgctgttcagaggggaggcacaggaagggggcacattgctggaaggccctcactagagtcagtggagactctggcaagggctggcagtgtatgaagagcagaggccctgcctcagtcctgccactcctcccatgtgactggaatgcccatagctgagtttgtcggtcttcttttctgttttccctgagaacgtaaaacagcaggggccgatcctgacaaagcacggcaagaacccagtcatggagctgaacgagaagaggcgtgggctcaagtacgagctcatctccgagaccgggggcagccacgacaagcgcttcgtcatggaggtgcgcagcctgaagctgcctgctggggcagtcccatggggaggcctggggtccccctgcccctggagggaggcactgagtcatctccatctgcactttccaggtcgaagtggatggacagaagttccaaggtgctggttccaacaaaaaggtggcgaaggcctacgctgctcttgctgccctagaaaagcttttccctgacacccctctcgcccttgatgccaacaaaaagaagagagccccagtacccgtcagagggggaccgaaatttgctgctaaggtgagcagtggcccttgaacctccttgcccaggcatgggttcttctgcaatgtgagcacgaagggaatgtcacttccctgtgttctcttctagccacataaccctggcttcggcatgggaggccccatgcacaacgaagtgcccccaccccccaaccttcgagggcggggaagaggcgggagcatccggggacgagggcgcgggcgaggatttggtggcgccaaccatggaggctacatgaatgccggtaagggccctcatactgcactgtccccgccttccccacgtgcatgctctgggaacaaatgtgtggggctcctggggtgggccggagacactgctggaccccggtaaccctgtctttccctttccaggtgctgggtatggaagctatgggtacggaggcaactcggcgacagcaggctacagtaagtgtgcgtttctgtctgtctgacctgggaagcagctgcagtgtagcgtctgggcctgagttagcaaagggtggccagagcagcctcgaggaggctgtagaaggggcacacacctttttgcggtgattaggtcagacggccctcgacccccaccccttcccggccccacagtgggattgattgtgttaatacacgaactcgtgtaactgcaaagttccttaaaagttagaattttaaatttctctgctttaagccatgcgaagcaccaatcttgtgaatacgcttttccggccagtgcacagctcttgtcttgagaaggagccttcattggggggttacaggagcagagaaatctaaaacatgaatttcaaatgtggcgctctgtgccctttttcaaaagaattctaatttcttctctctgctctgtctcccccttttgtaggtgactttttcacagactgctacggctatcatgattttgggtcttcctagagcgtctaaaagtattgcacacaaaatcaactttttactccaatttcctccaactccaaaacccaaagtgtccgtgctgtgtccctgtgcttcactgggtttctcaaccgtggcttttcaccgcagcttgtctgaaactcttagcctgcagaatttaagacaatggcagtttttatcgtgatttgcctttgaacttggtcctattgaagttcacaataagtggaaaacaattttttcagagaatgtatttttgtgcagaattgcacagaattctagagacagcgttgttcggcatcaaggcaaaagcccacctttgctttttatggaaagcattactttatttaaagagacagacaatgacgcattttaatctacctttgtcttaatttacagcaggttttgtatgaatttttaaccttttaacaaactcccaaatctggttgatgcctttgacagtgatgaaaacgatttcaccacatctgaatccagagaaaccggctttttttcttattgcgagcatgttaaaacgttgggaacatgtggggaattgtatattgcgctgaattaacttctcccgcctcttgtaatgctctggtgggttcttgtttgggaatgcgatattttgtggctggtttagctagagagtgaactctcaaaggtatcaaaactgtgcttccattattagtgcaagaaacagacaggctttaaggggtagatgacgtgaaattttgcaagtcttaattacagctgcagatgcatgggattctggatttttttgttgctttttagtttaatgggactttaaaagtaattgaggagaaagaaccgtgatgttccctgtttctccagtaaaggactggcttttgcttgggcagaggtggtgctgctgggtgtgcagctgccacagactccaaaggcgtagaagtttgtgccaacacacggagtcattctggctctctgctgaggcccctgttttctggcaggtgccctccttggaaactggttttggctctgatcagcggttctttttgcagcaaagcctgcatctgtgttgacttgcaagattttgcgtttattcaggcaaaaactggtcaaaatggttactacatgatttgttcccagaggtttgaaacattcagtgaaactttttaaaactttgattgcatgatgtattttttttttagaaagttattgtttgagaataatgtctttttataccaggaaaatagttatcctgaatgacgttgaaaactccccctcccctttatttttttttaatcaatacatgtgaaagtaacaagccctcggcccttgcgtcttcattcattcccggcttcaggcggggcgaggtggtgtgctcagtgcaggacactggggaagctggggctgtggggctgtggggtgtgggtcctggtgggggggttctgaagatcccatcctcccagtctcctcgctgagctgccgcatgttcgctttctggcattgtgggacacatcctcccccttggtgtcttggctttgtgatggcgggcgagggaggaggcctgcctgaagaacacaaactgaaggttgcagatagttctgtccacgttgtcatgcaggcagcccaccacaccagcgtggggtacacatctccagtgggtggaggcacgtgaggactcccagttaccctacccaggaggcggtgggcccttagtgtcctcaatctgggaaggaaggacaggcagcgtgggagcctccccttccctcccacccaccctgggcctggaggtctgggcagcctgactgggcaaaggtggctgcattcacaagccgacccgctctgagagcccaggaactcagctgcgcctggtgagcgcttgggcgttggccagcttggctggagagccaccaccatgacccagcctcccacctcacccaccctctgagccttcccacacccactgtggaggctccctgtgtggggctcccttgcaaggcttggggtgcagcattccctcagccagtgccgtcccctttgttccactcgagcctctggcggggccgtgtattgacaaacctagtgaccagaagtggggtctcactgctacattttcagcttgcggctgagaatgtagtggctgcactgcacactttcagccctgctgctcagccccacctgcacccagcagctgtgctggggacaaggaaggggcctcgggagtcattagggctgtaggtctaggcctcacccggctttcctgccccagccgtggccactgccctctgccagccaggctggggcttggtcacatcctgagtcacatgcttgcatgagtatcgcaagggaggtgcctgcatcattgactgagtctcgatttgtcttccaagaaccaaaccagctcagaccagttggtcttctcaggatgatgacggtccggggcctctttaaatagcatcttttaggggcctccaggcctgtgcctgtggagcctgttcccagcacagcagggaggaggggggtggctgctgcttctctggggctttgcttttcctgtcaccattggggatctctgggtagccgtcagctagctgtgaatgtcgtcccgcgctcggagtccatctcattgtaatgttgacatccgctgcaaaagctgctggcgcgtgctgcttggcaaagccccattgttgtcatcagctgctgggtgagtggagctgaaggctgggccagcccaaacggctgtgctaaggaccggagccactgctcctctccctccttgtcctactgcctctgacccgggcttgtgggtcagccttcaggacccatggctgccgcctgcccttccctcccttccccctgccctttcccgtcctccgcctgacccactgcctccctgtttaggtcagttctacagcaacggagggcattctgggaatgccagtggcggtggcggcgggggcggtggtggctcctccggctatggctcctactaccaaggtgacaactacaactcaccggtgcccccaaaacacgctgggaagaagcagccgcacgggggccagcagaagccctcctacggctcgggctaccagtcccaccagggccagcagcagtcctacaaccagagcccctacagcaactatggccctccacagggcaagcagaaaggctataaccatggacaaggcagctactcctactcgaactcctacaactctcccgggggcgggggcggatccgactacaactacgagagcaaattcagtgagttggcttccagagcccctcggccgggccagggtccaggccccagcagtgcagcccacggagtggcagaagctcggcactgcccagacctctggctgagggccttaggaggaggacaagtggtgctggctgcgggcgggtgctaggaagatggggcgtgggacctcatggtgccgtctccgccactctctctggtgtgttctccgaaggcagggtagctgaggcctctgtcccgaggccctggctgtgggtgaggctgcaaggtgacttcctgggacttgctctagagagttttgcatccagcccctgcaagagcctgacctctccgccaccgcctttccgcttcctcatgcgcagacccagcaggcccgggctgcaccagtgacccagtggggctgagtaggtgtgtccttgggacccagcagctgtcagcagcaggccagggacttgacagaggctgtgctggtgggtcagaagggggtgctgtgtgtctggtgctgctggctgaggagaggcggctgctggggtctcaagcacttcctcagctgctgctgggaagtttgggctgcaggaacagatgggaaggcaccccagagcagggctttggagcttggtgaccagcccagcccagggccaggtgaccctgcagggctccagctggcccctggtacttacctgatgggctgatgtgcgacattgaagcaggcagggagaagagttagaggcccagggtctgggccaggggccggccgcgtctgaggcgcaccacaaggcccccgggccgcccaaggtgtgtctttcctggggccccttaaccatcctgtcttctctcccccagactacagtggtagtggaggccgaagcggcgggaacagctacggctcaggcggggcatcctacaacccagggtcacacgggggctacggcggaggttctgggggcggctcctcataccaaggcaaacaaggtgggcctggagcccctggtggcacagcatggggggcctggcagctgctgtgaagcgggatatggacctggtgggagcagacagcagcgtgggcagggctgcagtggcaggtgggccctgtgagaacacgcactcggatgcactggcagctgctaaggctttcgggagcagccggagagccagcagtgtccccacgcttaacccctggtacctgtgtgaaatgtgggtgacaccaaggccaaacagctgttcccccggttctggccagtagctcagccttgggctcaggtagcttctcccagaaacgagggtcacagtggtcccacctctcagagtcttggtgccagcctgatccagtgatgtgtggtaggcaggcagagccgcacaggagcccataagtcttgcccacctgcatcctggccgaggcttgggtgtgggctgcctaacctgagccccgctggctgggcccctcggctctaatccaccactctctctcctaggaggctactcacagtcgaactacaactccccggggtccggccagaactacagtggccctcccagctcctaccagtcctcacaaggcggctatggcagaaacgcagaccacagcatgaactaccagtacagataagcccccgcggggcggagatttctaccttctgcacttactccccatcagaagatcgagttttatgcatcacagttaacatgtcagctggccctccaggcccccgcccccatcccgtccacgttgctgtgtcgtgaggtgcagcgggtcaccctgtggcccgtcctgtgacccatatttagccgtgtttgggactccgtgtcttcaatggtttgttagttgccattacaactttgtctgggtagagtttttgagtttttgcagttcagtatccctctgtctattcacacttcgtgttagtggtaactcagtttgtctttaaatagttacagaagggatacgtcatttgttaatgcttttgtgaagtgagttaaacgagctttctgtattttaatgctttagtgtttcagttttataagtgaagattttattttaaaaaccagtgggaaagagtggggggtttctttttatgtctgggtcattcaggcagtacatctgaattaagctgaatgtagacaaataaagaaaaacaaaactgcgcccgtcttaggcctgggtgtctgacccaccagcagtgcaatgggcaggtttccccactctattcctgctcttgggaaagcagcgtgggccatcaggatggtccctggtccttagagagggtccagttcaggcttctagacattttactcatgctcagcgaaggctggttcctggtcccctgggctgtgtagacccggtgtcccaccaggctccaggctcccaccatctacagaggggcttacagcgcccattctggtcttggggaacccatcacaaaataggctttttctgctccccgattctggtgtagttctaagtacacagtgatgtcctctgtaggggcgtgcctgtggtggaacataacgcagttacaaaagaaagggcaggtgaggcctgggtaaccccagccatggaccgtcagtggctggagggagcttcgtgtctgtgctggagctgcagcctgctcgccatctggaggctcagtggagtggggagttggggttctcataccagcagatttccctagagcgtgattctcccatctgaggcaatcttgcctcccaggggaaattttgcaatgtttggaggatgttgtcacagctagtagcgggtgctctgggatctggtggatagatgccaaggatgctgtcaagcatactgtactgcccagaacagtggcccatagcagggacctgccctatcaaaatatcaggtgtatggaggtggagtcccaacgctagagcagcccttctcagctccaccctgcccggggagggaggaggagctctggtttcagagcagtgccgggattgcctttccccaggatctgtgtcggccatccaggaagaactgtactggccaagcctgggaccacacgtctgcagagatcctgctctgctggcctgagccccaggccttggcctcctgtgcttgggtaaccatggccactgggaaaagcaaggaccgtgtttgactttcttggagaggtgaaagaggtgaaagaacaagttgtgtgctagaaaacttttgaggaattcttatttgtgttagagcagaggaggtcccagataccaagtggcgcctcccaggaaaggctgggagaagaggtggcctggagtaccccgagatcccagcagcgcacacagtggagggatgaggatggatgggtcctaacccctgattttgatgggatgtgttcatgtcctatctcctctcctggacacattaaggggttgggacaagaagagactcctgtgagatcagcagacctcgtgtttaaggagagaatgcctgcctgcaacactcatggagagggacacttcctggccccacctgctaaatacctccaaactctgggcaggcgcctgcattctcaacacaggacttcccttaacagtttccggatcagtgaccaccaccacgttcaggtttctgaatgcagacccaccacgagggatggattccacccgcccgccctgctgcagatacatgcggcacagcaggcacgtgcctggagagaacagctcctgagcacagcacccttggagccctcaccccgctcacgatcctcaccagtgctgatgatgccgtcatgctgctggcctgagacagtatcccagctacaacaggacgacaccgggttcaggaatatgtggctatcaccttgagcactgacagtggccttccaggctagttgccttccaaacgcaggtagccgacctgcaggagggcctacaaacgggcccagcaagagctgggcaacagctggcttgtgaaatgagacaccttgaccaatatgctttgggtggacggtctcctacatgttcagtggaggccaccaggagcatccatgagcggggaaggggtccacacccttacatggcaagttgatacgatggggtgcttggtggatgggccatggaggtccgtgagctggaactgggcacacgccatcccagagggctcaggatgccccaggaaggaaagaagggcaacagactacacgattggacgtgtgtggttgactgggatgaagttggagggaggggcagggccttgcaggggattggtactgatcccagggaggaagtgttggggcttcatgaactaggatgaaaggaggcccctgagccatgacaaggggcacatccaggatttccgccaccctgaatttagtagagctagtaggccctggtcgtcactctgggcagggatgccgtcagccttgagggtcgccacccacctgtgtgttgccctctgtcctggcagggaaacatacaccccttgtctcaccaccaaccttgcttgtgtagtcagcagggctggccctgccccaaggactcactgcatgtacccggacccctaggcctggcctttgcagcatagttgggagcttctggattccatctgcacctgtgagccccatgctggctgtgcactgcgcgggcctgagactgctggatacaatgttgggcaacaactcagccagcctgatggcagcctcagaggcttactctaacccatcccagaataaatggagacttcatgtgttcattgtttcattcactcaacatgcgttcgttcattttttaagagagacaggatattgctctgtcatccaagctgaagtgcagtggtatcatcgtagctcactgcagtcttgaacccgagagctcaagcgatcctcccgtcacagcctctggagtagctgggaccacagggctgtgcctccatgactgactaattttcttgtagaggtgggtcgccaagcctagtcttgaactcctggccttaagcaactcagcttccctatagtagctgggatgacaggcagcgccactgtgccctgctgtcgtgtttattattgcacagtgattacatgtcaagtctggtgctggttgctgggaacgaaatggtgaacctgctcccaacccacatgtagcttccaggcacaaagagggctgtgtcacagtgggacaggaagtgcctgtcaaggctttcccctcaggtgagaggatgggtgagttggacccaagagtgttaggaagggaaggggaggccaggcagagggaatagcttgagcaaaaattcagctgggggatgaggatgggcttcaagaagctgaagtcaggtgggtagagcattttgatgcaaaacaaaggaatgctgggaaatgaggctggaggtcagtgggatcttgagggcccccaagtggagtgccaggcacaggagttcttgccttctttctaaggacagtggggagccatggatggattctgacctgggaagacttcaggcccattcaggctcccaagagtatatatttgtttatttattttacttatttagagatggagtttcgctcctgttgcctaggctggagtgcaatggcacgatctctgctaaccacaacctccgtctcccgggttcaagcgagtctcctgcctcagcctcctcagtagctggaattacaggcatgtgccaccaagcctggctaattttgtatttttggtagagacaagttttctccatgttaggctggtctcgaactcccggcctcaggtgatccatctgcctcggcctcccagtgctgggatgacaggtgtgagccaccgcacctggctgtttattttttaagatggagtcttgctctgtcgccaggctggagtgcagtggagcaatctcggcgcactgcaacctccgcttcccaggttcaagcaattctcctgcctcagcctcccgagaagcggtaactacaggtgtgtgacaccatgcccagctaacttttgtttgagacagagtcttgccctatcacccaggctagagtgcagtggcatgatctccgcttactgcaacctccgctttctgggttcaagtgattgtcctgactcaacctccctagtagctgggattacaggtatgcaccaccatgtccggctttttttttttttgagacggagtctcactgtcgcccagactggagtgcagtggcatgataccgctcactgcaagctccgtctcccgggttcacgccattctcctgcctcagccttccgattagctgggactacaggtgcctgtcaccacgtccggctaattgtatttttagtagagacggggtttcacgtgttagccaggatggtctcgatctcctgacctcatgatccgcctgcctcggcctcccaaagtgctgggattgcaggagtgagccaccgcgcccagccaattttttgtatttttagtatttagtatttttagtatttagtatttagtatttttgtattttagttccaccttgctggccaggctggtctcaaactcttgacctcgtgatccactcgtcttggcctcccaaagtgctggtattacaggcgtgagccacacggcgcctggcctacagtttttttgtttgttttgttttgtttttgagatagtctctcgctctgttgcccaggctggagtgcactggagtgatctcggcccactgcaacctccgcatcccgggttcaagttactctcctgcctcatcctcccgagtagctgagattacaggtgcccagcattatgcctggctaatttttggatttttagtagagatggggtttcaccatgttggccaggctggtcttgaactcttgaccttgtgattcgcctgcctcagcctcccaaattgttgggattgcaggcgtgagccaccgctcccagctgaaactattttttagacagggtctcggtctggtatgcagtggtgccatcatggctcactcatcctcctgagtatctaggactacaggcctcactgcctggctaatgtttgtttttcttcataggggcagggtctcaggttgatgtccaattcttggcctcaagccatcccctcttcagcctcacgaactgttggaattaaccattgtgagccaccgcgcctcagtacagttcttttggttgctgagctgagtaggtgtatgggagaggtgagaatgggggccctggagacgacaagaggcttgacttttggaacatcggagctgaggtttacagtgatttttgcagctgagtccactggtcttgataagggaagagtttctagactcaagagggttaaaaacggtatgtcaaagaaaaggggcccgtccttctcattctcagggagaccagcattctctccacggagtagccaagaagtccatgaactcccaggtcttgggccagtgcttttgtcttctcaaaagatctggcgcctaaggtcttcttgcttggcaacagggcagtaggtgggtggcaatgtcacagagggacggtccccacacgtccgatgaataaactggagaaatcctccaggctatcgagacgaccacccgaactcagggctccaaggaccattatttcagcaaaacccctaactctcctctcctgaatgttctgtattcctcagtcagtgctcagaagtccgtatcctggacccaggacctcagcacccgctccctaaggccaaccatatagtcccctgtttgggggctcccctgagcagtcgcgggcgatcccagagaaggcaagtttcgggatctgacagccccagtcacgaccctgggtgctgcgcaagcctccatgtgaagagcgcggaaaccgccccaggcctagctgctgcaaaccaccgcttccaaacttcccgccggtctctaggctccgggtgcccaccgccccttccttccttcctttgcgcaatcaacaagctccaactccagatgggatttcgcaggccctgccctgtgtataaactctcttcgtcctggggttgtcaacaaaatttttttttggagacggagtctcgctgtcgcccaggctggagtgcagtggcgcgatctccgctcactcactgcaacctctgattccctggttcaaacaattctcccgccttagcctcctgagtagctgggattacaggcaagcgccaccacgcccggcaacaaactcttctaattggccggactcgcaggccccgcccccacagagtgtgccactgcgtggagcgcgccgctcctcatagggcgcttgcgcaggctccgctccctgagcggccgctttcctggtctccaggcaacgcgtacggcgctgtccactgtgctgaagccgcacaccaagcgccgcctctagctgcaggctcacggcgcccccagctctcctaagtgggcggtgccaacaccctaaagcagggaccactaagcctcctttgcgccctatccccagtttatctcttggtaataggtagagcccacttccctccacgttggctgagaaagccctaccgtcccatccagctcagaggaaagcccaaggcttcccgcgatttcatgccgtcacctccacaccctcatccgctcacctccagccacactgacctccgcgctcacaacagacaatccagacacattcccacctccaggcctttgctcttaactgttcacgaggcctggagtgctctctccgattccgcatgactcctccatcctcctttcaggctcaaatcccaccgtctcagtgagcccagccctgactatcctgtcctactgaacacattgacctctctctatatgtatgtatgtatataattttatttttagttttttcgagacaggatcttgctctgttgcccaggctggagtgcagtggtgcgatcatagctcactgcagcttccacctcccgggctcaagctatcctcctgcctcagcctcccgagtagctgggactacaggtgtgcagcactgcgcccgtataatttttgtatttttagtacagcagaggttttcgccgtgttgcccaggctggtctccaactcctgggctcaagcgatctacctgcctcagcctcccaaggtgctggaattacaggcgtgagccactgcatccggactagaatatatttgtttaagtgggtggattaagcctcttttgataattgttgaagctgggtcattggttacaaggtgataactatgcaattctctgtccgtttgtctatgcttgaaaagtgtgtaatgaagaatgtcaggtggcacagtgatctccaggaggggcagagaaccagcatcaggggctacacagctagtggtggtaccccaacgccaaccccacacatagcccaatctcacaatgactaagtacagagactgtagttgatgctacaaggattactgtggctggagaccagatgtgcaaccacctataaacttcctgagtgtagcttcagttttgacataaactgttcttattttcatgaatctctgtgacatggatgtagctgcctccaactcctgtccctagtgttttcgagcccaagggcctgtttctccttatcattggcttttttctttttctttttctttttttttttttttttgagacggagtttcactcttcttgcccaggctggagtgcaatggcacgatctcggatcaccacaacctccatctcccaggttcaaccaattctccttcctcagcctccttagtatctgggattataggtatatgccaccatgcccggctaattttgtatttttagtagagatggggtttctccatgttggccaggctggtctcaaactcccgacctcaggtgatccgcccgcctcagcctcccaaagtgctgggattacaagtgtgagccactgtgcccggccaccaccactggcttttgatccaaattgtgaatggcagaacctgagccttgtgcagcctggctgcagggcaggctgggaaagtaactgtcaattataacttctatggaaaggcaggcttagccttaaaaaatatgacattctctcaatgcaggggtgtatgagcggggtcaggtgttaggtggccaagaaaagaaggggctatactagcttcagaacagcaaatccaggcaacccttaatccaatcagccattcatccaatcatggtgattgcattctaaaatgcagaggattccctccaacatcccagaagctttggataaccaagaattgcaggcaggtcagagctccaagataaggtcacccagaaaagaaagagactcactttggataagataatgaaatgctgtttttggaacctaaaccactgagaggcaacattggctgcacacagaaattccttgaggcttaaaacaaaaaacaaaagaaaattgatgactgagtctcatccccatagatttttttttttaagagatgatcggccaggtgcagtggatcacacctgtaaccccagcactttgggagactgaggcaggtggatcacctgaggtcaggagttcgagaccaacctggccaacattgcaaaaccctgtctctactaaaaatacaaaaaattagctgggcatggtggtgggcgcctgtaatcccagctactttaggaggctgaggcaggagaatttcttgaacccgggaggtggaggttgcagtgagccgagatcgcaccattgcaccctagcctgggcgactctaatttctggcctcaagcaatcctcctacttcatcgtcccaaagtacataagctactcaccatagattttagtttaagttgtctgggcatagagatagttaaaaactccacaggtaattctatgtgcagccaagagtgaaaaacagtggttctgaaacgagtgggcatcagaataacacagaaagcttggcaagaagcagacttaaacacatattggccaggcgctgtggcaatcctcctgcttcagtctcccaagtaactggaattatgggtaattttttaactttttttttttttttttttttgccatgttgcccaggctggtctctaactcgtgggctcatatgatccacccaccttggcctcccaaagtgctggaattacaggcgtgagccactgcgcctggtaaacattttgaaaaatagaaatattagctgggcacggtggctcacacctgtatcctagcactttgggaggcctagatgggtggatcgcttgaggtcaggagtttgagaccagcctggccatcatggtgaaaccttatctctactaaaaacaaaaattagccggacgcggtggctcacacctgtaatcccagcactttgggaggccaaggtgggaggatcacctgaggtcaggagttcgagaccagactggccaatatggagaaaccctgtcgctactaaaaatacaaaaaaattagccaggcgtggtggcgtatgcctgtaatcccagctactcaggaggctgaggcaggagaatcacttgaacccaggaggtggaggttgtagtgagccaagattgcactattgcactctccagcctgggcaacaagagcaaaactccgtctcaaaaaaaaaaaaaacaaaaaacggccgagtgcggtggctcacgcctgtaatcccagcactttgggaggccaaggcaggtggatcaccaggtcaggagatcaagaccatcctggctaacatggtgaacaccggtctctactaaaaatacaaaaaattagctgggcgtggtggcaggcgcctgtagtcccagctactcaggaggctgaggcaggaaaatggcgtggacctggcaggcagagctttcagtgagcagagattgtgccactgcactccagcctgggaagcagagcaagactccatctcaaaaataaaaaaaaaattagccgggtgtggcagcaggcacctgtaatcccggttgcttgggaggctgacgtaggagaatcgcttgaacctgagaggcggaggttgcagtgagctgagactgtgccactacactccagcctgggcaacagagtgagattctgtctcaaaaaaaaaaaagaagaaaagaaaagaaagaaaagaaatagaaaagaaaggatgagtgttgtagacaaaggcaggtgcaaaggccctgaggttggcttgctggtgggcaggggtgttttccaggcgggttttccgggtgtggccttactaaggatgccccaccatctgggcaaccggcatccttagcctttcttacaggatagggggcttgaggctcccttagacaccctcttggccagagtagctcagtttaagacaattgaaaggacatcttctgggacaatagcgctctctgctggccaggacagatatcagatccagttgtaatgataacaattactatataatattgtatattattattatctttttttttagggtttcggtctcactctgttgcccagcctggtgtacagtagcccaatcatagctcactgcagcctccaactcttcagctcaagtgatcctcctgcctcagcttcttgagtagctgagactacaggggcgtgccaccacaccatgttaatgtttttgttttgattttgtttttgtttttgttttttagatgaagtctcgctttgtcgcccaggctggagtgcagtggcgcaatcgtggctcgacctccgcctcccgggttcaagcgattctcctgcctcagcctcccgaatagctgggactacaggcacgcacccccacgcccggctaatttttgtatttttttagtagagacggggtttcaccatactggccaggctggtcttgaactcctgacatcgtgatccgcccgccttggcctcccaaagtgctgggattacaggcgtgagccaccgtgcctggctcacaacctgttaattttttaatttttaaaacttttttttctttttgacacagagttttgctcctgttacccaggctggggtgcaatggcacgatctcggctcactgcaaactccgcctcccaggttcaagcaattatcctgcctcagccttcggagtagctgggattacaggcatgcaccaccatgcctggctaattttgtatttttagtagagacggggtttctccacattggtcaggctggtctcgaactcccaacatcaggtcatccgcccgcctcagcctctcaaagcgctgggattacaggcgtgagccaccgcacccagccacaccagcttaattttttttttttttttttttttgagatggagtctcgctctgtcacccaggctggagtgcagtggcacgatctcggctcactgcaagctctgcctcccaggttcacgccattctcctgcctcggcctccggagtagctgggactacaggtgcctgccactgcgcccggctaattttttgtatttttagtagagacggggtttcactgtgttagccaggatggtctccatcccatgacctcgtgatcctccctcctcggcctcccaaagtgctgggattacaggcgtgagccaccacccccggccctttattcaatctttacaaagtctttatgccgagatgctgtaattcgccacattttatccaagagaaaattatggctaagagagtctctgattgtagctcgaaagtgctagggatgggattcgttcccagttcaattctgattcttcgctttagcgtgttgtgggtaggagttaaatgggcccccagccaggaccaggggttcaaatccgttgccatggtcccccgacgctttcccgggctccagaacggatcgcgtggtcacgtgacagcggccaacatggcgccgcccactgtgtggtacggcccacgtggttccgacagtcaagatggcgggagcagctacccaggcttccctggagtcggccccacggatcatgcggctggtggccgaatgcagccgctccagggcccgggcaggcgagctgtggctgccgcatgggacagtggccactcctgtgttcatgccagtgggcacgcaggccaccatgaagggcatcacgaccgaacagctggacgctctgggttgccgcatctgcctgggcaatacctaccatctgggtctaaggccggtgggtgggctctgcccgcgcggggaggcggcgaggcggcgaggcgtggggagccatggagcgtcctccaggcccggacactcctcccaaagtcaatcgaccagctgtattgagcgcccccaatgaccaggccttgtactgggcgtgaaagagcagcagggactaaagctggccagatctgtctcccaagaagggcccccagggacgcggtcacccctaacctgacactttcttccatcaacccagggacccgagctgatccagaaagccaacggtctccacggcttcatgaattggcctcataatctgctaacggtgagctgaggagagagccgacgttctagggcccttctctggagtgaagggtccccatctccaccccctgacagctttgcggtggggtttcccttaggacagcggcggtttccagatggtgtcgctggtgtctctgtccgaggtgacggaggagggcgtccgcttccgctccccctacgacggcaatgagaccctgctgagcccggagaaatccgtgcagatccagaatgcgctgggtgagaggaccctggggagccgcctccttaccctgtctgtcagggggtgaagtttacacggggcctgttttttagctgttgtgtggctttgagcaggtcactcctcgctgagcttcagttgaaccaactcaaagcgggggtaaatagtagcaggtctttggtagaattgttgacaagtacatatgagatgatgtcagtaaatctccatcccagccatgtagtagcttaagtattattattgcagtttttctctcattagcaaattaagactggacgtggaagctcatgcctgtaatcccagcaatttgggaaactgaggcgggaagatcacttgaggccgggagttggagaccagcttgggcaatacagggagaccctgtctctaccaaaataaaaaataaaaaataaaaaaaacaaattaattggacaaatatctgttgaaataatggtggcaacaagaggattggggaggctttaggcttctcccatatcctcaatatccttctttttttttttttttttttttttttttgagacagaattttgctcttgttgcccaggctggagtgcaattttgcgatctgagctcactgcaacctctgcctcccgggttcaagtgattctcctgactcagcctcccgagtagctgggattacaggtgtgcgccaccacacctggctaattttgtatttttagtagagacagggtttctccatgttggttaggctactctcaaactcctgagctcaggtgatccgcctgcctcggcctcccagagtgctgggattccaggcgtgagccaccacacctggctttttttttttttttttttttttgagacagagtcgcccaggctggagtgcaatggtgtgatatccagtcactgcaacctccacctcctgggttcaagtgattctcctgcctcagcctgctgagtagctgggattacaactgcttgccaccatgcccagctaatttttgtattttttgtagagacgggtttcactatgttggcaaggctggtctcaaactccggacctcaggtgatccacctgcttcggcctcgcagagtgctgggattataggtgtgagccaccacgcctggcccaatatccccatttcttgataaagaaccatggcaacacagggtcaaaacccctcttcccctcatcattctaatagattgatgctgtagggaggaagaaatattttttcttcttagattcatggctgaagcccctataacaaaaacccttataagaaaagaagccacgtgctgggtgcggtggccacgcctgtaatcccagcactttgggaggcggaggcgcgatcatgactcactgcaacagctgcctcctggttcaagcaattcgcctgccttagcctcccaagtagctgggattacaggtgcccgctaccacacccagctaatttttgtattttcagtagagatggggtttcaccatgttggccaggctggttacgaactcctgacctcaagtgatctgcccatcttggtcccccaaagtgctgggattacaggtatgagccactgtgcccggcctataagtttatttttttatgtttatttatttttatgtattattttgagacagagtctcactctgtcacccaggctagagtacagtggcacaatctcaggtcactgcaacctctgcctcctggcctcaagcaattctcctgcctcagcctcccaagtagctgggattacaggtgcatgccaccacgcccagctagttttttgtatttttagtagagacagggtttcgccatgttggccaggctggtcttgaactcctgacctcaagcgatctgcccgccttggcctcccaaagtgctgggattacaggtgtgagccaccatgcccggccaaatattttttgtagagattagagtctcactacattatctgggctggtcttgaactcctggctacaaacagtcctttgccttgaccattcaaagtgctcatgttacaagcatgagccactgtgccagcccccatgtgttttttgtttgtttgtttgttttttctggagatggagtcttgcttagtctcccaggctggagtgcggtggcgcgatctcggctcactgcaagctccgcctcctgggttcatgccattctcctgcctcagcctccggagtagctgggactacaggcacccgccattacgcccagctaatttttttgtacttttactagagacggggtttcatcgtgttagccaggatggtctcgatctcctgacctcgtgattcgcccatctcggccttccaaagtgctgggattacaggcgtgagccaccgcacccggcctctttttttttgaaaccgagtttcgctcttgttgcccaggctggagtgcaatggcgcaatctcggctcacagcaacctctgcctcctgggttcaagcgattctcctgcctcagcctcccgagtagctgggatgacaggcatgcgccaccatgcccggctaattttgtatttttggtagagacggggtttctccatgttggtcaggctggtcttgaactcccgacctcaggtgatccgcctgcctcagcctcccaaagtgctggcattacaggtgtgagccaccatgcccagctaaagttctagctttttaatgaatgtcgtaatttttttttttttttttgatgtggaatctcgctctgtcacctaggctggagtgcagtggctcgatcttggctcactgcaacctctgctgcccgggtttaagctattctcctgcctcagcctccccagcagctgggactacaggtgcctgccaccacgcctggtaatttttgtacttttagtagagacggggtttcaccttgttggtcaggctggtcttgaactcctgacttcaggtggtccacctgcctcagcctcccaaagggctgggattacaggcgtgagccaccgcacccagccccatatttattttttcgtcttttctttttttttttcttttttgagaaggagtctcactctttgaccaaggctggagtgcagtggcactgtgttggcttactgcaacctctgtcttctgggttcaagcacttctcctgctgcagcctcccgagtagctgggattacaggtgcccatcaccacacctggctagtttttatatttttagtagagacggggtttcaccatgttggccaggccggtctcgaactcctgacctaaggtgatccacccgtctcggcctcccaaagtgctgggactacaggcgtgagtcaccacgcctgcccctttttttcttttttgagacacaatctcgctctgtcacccgggctggagtactgtggtgcaatctcggctcactgcaacctttgcttcctgggttcaagcgattctcctgcctcagcctcccaagtagctgggacttcaggtgcatgccaccatgccgggctaatttttgtatttgttgtagagacagggtttcaccatattggccagggtggtcttgaactcccgatctcaagtgattgacctgctttggcctcccaaagtgctggggttacaggcgcaagccaccaggcctggcctgttcttttttttttttttttttttttttttttttgtggagacagagtctcgctctgtcactcaggctggagtgtagtggtgcgatctcggctcactgcaagcttcacctcccgggtgcacaccattctcctgcctcagttcccgagtagctgggactacaggtgaccgccaccacgcccggctaattttttgtatttttagcagagacagggtttcactgtgttcgccaggatggtgtcaatctcctgacctggtgatccacacgccttggcctcccaaagtgctgggattacaggcgtgagccactgcgcccggctgtggcctgttcttttttattttaaattgttttcatctatttattttcttaataatggagatggggtctctctgtgttgcccagggtggtctcgaactcctgggctctagtgatccttccgcctgggccttccaaagtgtttggattataggtcatcaagtttcattttatgccactaaaccactatgctgtgcaccgtggctcatgcctataatcttagcacttttgttttgtttttgagacggtgtctcgctctgtcgccttggctggagtacagtggtgcaatcttagctcaccgcaacctccgtcttccgggttcaagcgattctcctgcctcagcctcttgagtagctgggattacaggaatataccaccacgcccggctaatttttgtatttttagtagagacggggtttcaccaccttggccaggctggtctcgaactcctgacctcaaatgatccacctgggttggccttccaaagtgctgagatgacaagcgtgagccatcgcgcctgtttttttttttttaaccttttttttttttttttaacacagccttgctctgtcatccaggctggagtgcagtggcacaatcttggctcactgctacctctgtctcccagattcaagctattctcctgtctctgccttccaagcagctgggaatacaggcacgtgccatcatacctggctaatttttgtgtttttaggagagatggggtttcaccatgttggcgaggctggtcttgaactcctgacctcagatgacctgcctgcctcggcgtccccaagtgctgggattacaggcgtagtcactgcgcccagtcagcagagccctgctgatggacgtttggtttcccggtcttgctgtggcacgccacatagcaagggatccctttgtatattttaggattttattttgtgtaacaggataggattttaagctggggagaggcaggatcaaaggcacattctgtaaagctccttctggctgctgtataaacagaccgggaaagtcacgtgggagttagcaagacgggggatggggggatgctcttggggaagtccaacttgtccccatgtgacggcaggctttccccaagcattgcgggctttcccagtgatgttgcccccatctcaccatcaggctcggacatcatcatgcagctggacgacgtggttagcagtactgtgactgggccacgtgtggaggaggccatgtacaggtgtgtatatgctgtgtgcatgtgtgggatatgtggtgggaggggatcctggtccctgtagccttgtctcctaccccctcaccaggcccctggggcttgtgactggggccctgttgcaggtcaatccgctggctggaccggtgcattgcagcccatcagcggccggacaagcagaacctcttcgccattatccagggtgggctggacgcagatctccgggccacctgccttgaaggtagagccatgcgctggcaggcccagggcttggccatcgcggaggtccccacatgggcctggcgtatggcgggactggattgctaatgtgtagaagggcactgcgctagaaaaaatagccggagcaaaggctctcgggccacgtgcagtagaatgtattgagagaatggccatgattccagtagttaatgatcttctaggttttttgtttgtttgtttttgtttttttttttgagacggagtctcaggtgatccaccccccttggcctcccaaagtgctgggattatagtcatgagccaccgcgcccagcctatttatgtatttatttattttactttttttttttttggagggtggagtcttgcactgtcgcccaggctggagtgctgtggcgcgatctcggctcactgcaacctctgcctccctgcaacctccgcctcccgggttcaatctattctcctgcctcagcctcctgagtagctgggactacaggcacccgccaccaggcccggctaatttttgtatttttagtagagacagggtttcaccattttggccaggctggtttcaaactcctgaccttgtgatctgcctgcctcggcctcccaaagtgctgggattacaggcgtgagccaccgtacctggcctctttatttatttttgagacacggtcttactctgttgctcctcctggagtgcagtggctaggtcaaagctcactgcagcctcaaactcctgggatcaagcagtcctgcttcagctttccaaagtgcttggaatataggtgcacgccggtgtgtccagccatgcattaccttttacatgcaatgctttctggtgttttcttttctctttcatttaaaaacaacgacaacaacccgtgcgtcatcaaagtcatttctcaaccacctgcagtttgacaagcaccgccccatggggtgcttctcaaagtgctctgaggcttacctgccccagcacaaactactgaaagtcctggtaaaatgcagctccccttcccatgatccgaccagagttggagctagggaaggcctaggaatctgcatgtaaacaccctgtgtccagttggaggatgctcacattaccttcaaaacctggccccagacaacgcctgcattcctttttttttttttctttttttttttttttgagacggagtttcgctcttgttgcccaggctggagtgcagtggcgtgatctcaggtcactgcaacctccaccttccggtttcaagtgattctcctgcctcagcctcctgagtagctgagattacaggcatgcaccaccatgcctggctaatttttgtatttttagtagggacagggtttcaccatgttggctaggctggtcttgaactcctgacctcgtgatccacccccaccttggcctccagagtgctgggattacaggcttgagccactgcacctggccaacacctgcgttcttgatggcatggcctcttcgggttgaactgggcagctggggcacaagataagcctggacttggaggccagacccaggtttgaatccagcctttggcatatgtagccttggactagtggtttaagctctgcaagcctcaatttcctcttgtttcaggcaagttgaacaatagcacaattctgcagccccttctgtgtcatccaggtcctcagagcgaaagtctaaaatccagaacattggccgggtaccatagctcacacctgaatcccagcactttaggaggccaaggcaagaggattgcttgagaccagtctgggtgacatagtgagatcccatctctaaaaaaagagaattgggccaggcacgctggctcacgcctgtaatcccagtactttgtgaggccaaggcgggcagatcacgtggtcaggagttcgagaccagcctggccaacatggtaaaaccccgtttctactaaaaatacaaaaattaggccgggcgtggtggctcgcgcctgtaatcccagcactttgggaggctgaggcgggcaaatcattgaggtcgggagatcgagaccaacctggctaacacggtgaaaccccatctctactaaaaaatagaaaaaattagctgggcgtggtggcgggcgcctgtagtctcagctactcgggaggccgaggcaggagaatggcgtgaacctgggagacagagcttgcagtgagccgagattgtgccactgcactccagcctgggcaacaaagtgagactccatctcaaaaaaaaaaaaattagccaggcatggtggtgggcacctgtaatcttagctactcgggaggctgaggcaggagaatcatttgaacccgggaggtggaggttacagtgagctgagatcacaccactgcactccagcctgggcgacagagcaagaatctgtctcaaaaaaaaagaaaaaaagaaaattagcacgcaagcatgggagtgtgtgcctgtgatcctagatacttgggaggctgaggtgggaggatcgcttgagcccaggggttggtggctgcagtgagctatgatgacatcactgtactgcagtctgggtaacacagtgagaccctgtctcaaaaaaaaagaagaaaagaaaagagaaaaaacttagaatgccctgaaaaatttgcaactcatttcatggctaacttagatctctcattttttatcccagttgttacaagtattcacatatttttatttttatttattttttatttttttgagatggagttttgctcttgttgtccaggctggagtgcagtggcaccatctcggctcactgcaacctctgccttctggtttcaagcgattctcctgcttcagcctcccgagtagctgggattacaggcaccagccaccacgcctggccaatttttgtatttttagtagggatggggtttcaccatgttggccaggctggtctcgaactcctgacctcgtgatccacctgccttggcctcccaaagtgctgggattacaggcgtgagccatgtgcccagcctatttttattttttaaattttactttggccgggcgtggtggctcatgcctgtaatcctggcactttgggaggctgcagtgggcggattacctgaggtcaggagttcaagaccagcctgcccaacatggcggaaccctgtctctattaaaaatacaaaaaattagccgggcatggtggtgggcgactgtagtcccagctactcggggggctgaggcaggagaatcacttgaacccgggaggcgagggttgcagtgagccaagatggtgccattgcactccagcctggatgacaagagcaaaactccatctcaaaaaaaaaaaaaaaaaaattaagttctgggatacatgtgcagaacgtgcaagtttgttacacagctatgaatgtgccatggtggtttctgcacacatcagcccgtcatctaggttttaagccccgcatgcgttatgtatttgtcctaatgctctcactcccctttcctccaccaagtcttaacatattttgttgtacaaatattacagtgtttgatgacaggctattgggtgttttgttgttgttgttgtttcgttttgttttgtgagacggagtctcgctctgtcgcccaggctggagtgcagtcatctgatctcggctcactgcaacctccacctcccgggttcaagcgattcttctgcctcagcctcctgtgtagctgggactgcgggtgcccatcaccacacctggctaatttttgtattttttagtagagacaggatttaaccacgttggttagcctgctttcgaactcctgacctcgtaatctgcctgccttggcctcccaaagtgctgggattgaaggcatgagtcaccgcgcccggcccttttttttgagatggagtctcactttgtcacccaggctggagtgcagtggtgtgatcttggctcactacaacctctgcctcccaggttcaagcgattctcctgcctcagcctcctgtgtagctgggaccaaaggcgtgcaccaccacgcctggctacttttcatatttttagtagagacagggtttcaccatgttggccagattgttcttcaacaccagacttcaagtgatctgcttgcctcggcctcccacagtgctgggatgacaggcgtgagccactgcgcctaacatgacagctgttactcagcatgtgggatgtttactgttctcacatctggaaaactctgaattctgaaacacatctggttccaacagtttcagctaagggactgtgggctgtgcctcttctgagtactgaaggaaaaggtcttgcatacagcaggcactcaataaatgttagctgagatcagcagtagtcccagcccctagacagacagacaaactgatggaccctctcctctgtctccctctccgtctccctctccgtctctggctctgtctgtctgtctctgtctgtttctctgactctctccctgagcgactctggaagtctgggcagggtgtgttctgggattgaagaccaggcgcatttcctcttctgtggccctcaccttaccctgtaccctcagagatgaccaagcgagacgtgcctggcttcgccatcgggggcctgagcgggggtgagagcaagtcgcagttctggcggatggtggcgctgagcacctctcggctgccgaaggacaagccccgatatctgatgggggttgggtatgttgtggatagggaagccagagccctacctgtgggaagtggattcctggggaccccctaccctgcttggggaggtggcatttgggggaaacggacacaggtctgatctgaggagactaggaagacatggctgtcccttgggggccattctgagggaatatggcccagtctggggcagtgtgagggttgggaggggccctgggaagcccctgaggttctctgccccctcccgtcatggctgcaaccccagctatgccactgatctggtagtctgcgtggctcttggatgtgacatgttcgactgcgtcttccccacacggacagcggtgaggctctggcagaaggaggtcagggcgggagacgggtgggggactagggaggcaaggttaggggtggggggtggggagaatgaagccctgggtgacgcccctttccctgcccttcctctcccacagcgctttggctctgccctggtgcccactgggaacctgcagttgaggaagaaggtgtttgagaaggacttcggccccatagacccggagtgcacctgccccacgtgccaaaagtaggcaggatggcactgggagctggggcagggcatggaggggacagggcctggccgtgctgagctgtcccctgccgctctacaggcacagccgcgccttcctgcacgcactgctgcacagtgacaacacggccgcgctgcaccacctcacggtccacaacatcgcctaccaggtgagccagtgcccggggcaaggtgggcgggggtgtcctaggtgcgtatgccccacgctgacctcccctccccgcagctgcagctcatgagcgccgtccgcaccagcatcgtggagaagcgcttcccggacttcgtgcgggacttcatgggcgccatgtacggggatcccaccctctgtcccacctgggccactgacgctctggcctctgtgggaatcacactgggctgacctggcattgggagagggagggaggaaggaagggagggaggggctggaagatactgaaggattcctttttgaaaggttttttttattgtaacttacagagtgtgtctgtgtcttcttgaggaagtggcctgtctgggtccccctcccagtctgagcgtcattgcagtggaatatctccccttctcaccaatcataacacgtcactgtggcagcagcggatagctggaaaccacctgccagtgcccagcatgtagggcgtgcccctagagcgggagctgccacctgcttcctggggcccaggccccccagccaccttggagggaggtactgttggcctctccttttttacagctgaggaagcaggcccagggaagggagggaacttgcccaaggtcatcaccatcaaagaaatggtatcttggctttaaggcatacactcctagtctgacttttataaatatgaggcttaatctcctatttttttctttcttttttttttttttccgagactgagtctcgctctgtcacccaggctggagtgcagtggtaggatctcggatcactgccacctccgcctcccgggttcaaacgattctcctgcctcagcctcccgagtagctgagactacaggcgcgtgccagcacgcctggctaatttttgtatttttaatagagatggggtttcaccatgttggccaggctggtctcaaactcctgacctcaagtgatctgcctgcctcagcctcccaaagtgttgggattacaggcatgagccacagtgcccagcctcttttttttttttttttttttttttttgagactgtctccctttgtcatccaggctggagtgcattggttcaaacacggctcactgtagcctcgatctggagccgccacacccggtctactcttgcaacttgatgttgcatgtacagtcgtgttccattttacggaggaggacactgaggcacagaggaatgaagtttacatggtcactgtcactttcttagtccgttctggctgccatatataacaaaataccatcaactgggtggcttataaacagcagaaatttatttatcacagttctagaagctgggaaattcaagatcaaggtaccagcagattcagtgtctgttgagggcaaacttcctagatggcgatcttttctctaatctcacatggcgggaggggcaaggcagctctctggggtctcttttatgaaggcgcagtgagaagctcagcaggtttgtgaaaagaaaaaaaaatacataagggcacaaatcccattcacctaatcacctaatcgccttccaaaggctccacctccaattaccatcatgttggggattaggtttcatcatgtcaatcttggtgtggtgggtgatggggtagagggctggtctataaacattcagaccataataatcagtaaataaacaggcccaggatctaacccagatatgatcagttacagagctagtgatcttcaccagcctgggcaacacggtgaaactccttctttacaaaaaatacaggtggtgtgcatctgtgctcccagctactgaggaagctgaggtgggaggattgcttgagcccaggaggttgaggctgcaattgcaccactgcactccagcctgggcagcggagtgagactctgtctcaaaaacaaaaaccagtgctcttcaaaaatgaagtttttgaaatggaaaaagtaggccaggtgcagtggctcacacctgtaatcccagctactctggaggctgaggcaggagaatcacttgaacccaggacgtggaggtggcagtgagccgagatcgcaccactgcacgccaccctgagagacagcgagatttcgtctaaaaaaaaaaaaaaaaaggttggacgtggtggtggctcacacctgtaatcctagcactttgggaggccaaggagggcagatcatgaggtcaggagttcaagaccagcctggccaacatggtgaaaccccatctctactaaatatacaaaaattagctgggtgtggtggcacgtgcctgtaatcccagctactctggaggctgaggcaggaatatcgcttgaagccaggacttggaggttgcagtgagccaagatcgcactactgtactccagcctgggagacagagcaagcctccatctcaaaaaaagaaaagaaaagaaaaaaaaagtccaagcgcggtggctcacacctgcaatcccagcactttgggaggccaaggagggagggtcatctgggtcaggagttcgagaccagcctggccaacatggtgaaaccccatctctactaaaaatacaaaaattagccaggtatggtggcaggcgcctgtagtcccagctacttgaaaggctgaggcaggagaatcatttgaacccgggaggcggaggttgcagtgagctgagattgcatcactgcactccagcctgggctacagagcaagactctgtttcaaaaaaaaaaaaaagtgaaaaagtaatacatgtatgtaatccacaattcaaatcacatcaaaagtgcaactacttttatcaatttatgtatttttccagcaattttccgtgtgtacatatggttttcatgcatgtcagcatccttcacacacagttctgtaccttgcttgttttttcctcttagtatatctcaaattatttatacttcagtacatgaagagtttcctcaacgtttttgtttgtttgtttatttgtttttgagacggggttttgctcttgttgcccaggctggagtgcagcggtgcgatctcagctcaccgcaacttctgcgtcccgtgttcaagcgattctcctgcctcagcctctcgagtagctgggattacaggcacgcaccaccacgcctggctaattttttgtatttttagtagaaacgtggtttcactatgttagccaagctggtttcgaacctctaacctcaggtgatctgccctccttggcctcccaaagtgctgggattacaggcatgagccaccgcacctggcgctttttgcctatttctttgagacctggggttttgggtcacaaaacaggcaaatgccatgagccaccctcctcctctttctccatcttcttgtgctgcctcaggtcagagcacttacctgctcctgccttctcactgggtttccttgtctctggcctatttgtctccagaggggtcaaaacacttcaaatcctcctatttgtctctgtccactgtcaggagttccagttcccagaaccccaattttgcctacaaaatagcgtgtcttttcacggggagaggatttgttgagttttagtgggtactcaaaaagatctaaagccagttgggggggttcacacatgtaatcccagcacttttgggaggccggcctgtgagggtcgtttgggcgcaggagtttgagaccagcctggacaacacagcaagaccctgtctctataaaaaataaaataaaaataattagctgggcatagttgcgcacgtctgtggttccagctactcgggacgctgaggcgggaggatcgtttgagcccaggtgcttgttgaattgagctatgagtgcactactgcaccccagcctgggcaacagagtaaggacccagtttctaagaaaagaagattcattagctagacgcggtggctcacacctgtaattccaacactttgggaggccaagacgggcggatcacttgaggccaggcgttcgagaccagcctggccaatatggtgaaaccccgtctactaaaaatacaaaattagctgggcgtggtggctcacacttgtaatcccagctattcgggaggctgaggcaggagaattggttgaaccggggaggcggaggttgcagtgagccaagatcgcgctactgcactccagcctgggtgacagagtgagtaccccgcctcaaaaaaaagaaaagaaaaaagattcatgatctgctaaagttgaagaagtgggggaaaacattggagtgttagcggcgtcaagatcgggcgtgagcagaaagggcacagcatttgcaaaggcgtggaggagtgattttattgcgttctatccctaggaagcaatgacttggcctctaccatttgcagagcgcattgggaccctgctcccagagctggtttgcagtctgggaactgagatgcgctctgggacttgtagttttccccagtgccaggaaactcaaaaatcgagacatcggatcccaccacgaggtgtcgcccttgagcgagtacggtgggatctatcctatacttcagaaggctgttgcagacatccaacaatcacaaggaagaacgggagtttttctgattgacagatatggttctcaatgatagtcaagattcggatgttaaagcccgccctcttttgcctggttggctggagcaacgaagtgatatttatatgaaccaatgggaaattcttagggaacgaggtagtagctcaatccccaacaccattggtccacattgtctactggcacgtctgcctgccaataagatggtggaacttcgccaatgggcagagccaacgtgcctttttcggaaacacccccttcctctcttgacaacttgctttctgccgctattggctgttgcacaacagtgacggttcttttgtccaataagtcagcaagacggtccccagggggaaggtttactcaaccataggcccgtgcctagtttttattggctagtgtatccgagtggcggtgcagcaggccagtcgcgtgcggcgcgagtgctttgggcgcagcccccggggccggggcgggaggtcgctcgggtcgggtgtcgcctgagaaccggatgaggcggcgaccgtgaggccgagccgggagcgggcgtcttgccgaggcccgggcgggcggggagcaacggctacagacgccgcggggccaggtcgttgagggtcggcggcgggcgaggagcgcagggcgctcgggccgggggccgccggcgccatgggcaaccgcgggatggaagagctgatcccgctggtcaacaaactgcaggacgccttcagctccatcggccagagctgccacctggacctgccgcagatcgctgtagtgggcggccagagcgccggcaagagctcggtgctggagaacttcgtgggccggtgagcgggcgcggcagggatcgcgggcgggtggcggcctagggcgcggagggcggaccgggaatggcgcgccgtgcgccgccggcgtaactgcggcgcttgcgtgcccgcggcggggaaccggacggggtcggggaggcgggccctgtgggacgccctgggcagaggactccctgcaggggctccggagcaggcccgggccccaggggcggtgtcacgggccagggcgccgtaggacaggaggtgcgctggaaccctgcggtccatctggtcccagctttcgtgggtgaagtctgccatctggttggccgtgggtctggggtagatccctcttctgctctttcgggctgtccatcagaggtgaaaccggccatctagatatctattggggcgaccgctgcggtctggctggcttgttcttgtatctggagctgcccccgccgtctggttggctgtctctctgtcctgggcaagcctccctgccaccaccatttggttgtccatctgtccagtcccacctggcagccccctgctgtctggctagctgtccagggtgacctctgctgtctggccgcccatccgtgcccctcacagactttaacactgagcagtccctctgttgggtgacaccagctggcctctactgtctgactggctagctgactcctaggggaccctgtttgattctctctggctgactcttacagcttgattcctggctagcgctggctcctctcttccgtgtgaattcttctgtctgtctggccatctcctagtctgcccatgactacccctgagtgtctggcacaacggctctggaaaggggtggtaggagggtagaggggagaacagagctgaaggaggaggtttggaccctacttcccctctcagctggaaggaggactctgggggtaccttacttcaggattcctttccgagtgctagaacacaggggcccgcctcccagctacagcctacaaattgggggccctcctttggagcctgggaaggggcttcttgcgtgatcaggcctcagtggctagcgctgggatgtagccttctctggacagccttgagaagccgcggtgtgcccatctgtccagtgggcaaactccactctctggggctgtttccaggattcaggaagcaaatgaatgagaacagcccgtgcagccacctctccctcccaccaacccctcttgcctttcttgtctcccagatgggcggccacttctccattccaggaactactcatttgtggtggtgtggctgccaaatgataacatcctcctcctgtcattattgtcattgttattgttgttatcattgtcaagggataatgtcccttcttgattcaacatcttgaatcccaagtaaggagtggggtggaggctgtgttatcatccccaccttagctgagctgggaggctcagaagggactgtgatcacccaaggccactaggctggcgtaaggccttgtgtctgccatcccagagccttggggctttgctccaagcagcacaaatctcctcttttgctaccttgtctctagctcattgccttctgtctaccgtggtggaaaggtgtggacttgcagccagctgggcctggcctgatctcaggctggactgtggtgtgggcccctttgagtgaccatcttcctgcctgcccaggcttctgggacgggggtggggggtgtttgcaaagctctgtctctttcacttgccttgtgaccttgcacaggttgtcttggcctctctaagtcttggttgactctcctaaacaagtttattttattttatttatttatttattttttttttttttgagacagagtctccctctgtcatccagtctggagtgcagtggagcaatcttggctcactgcaacctctgcctcccaggttcaggccattcttctgcctcagcctcccgagtagctgggattacaggcgtctaccaccaagcccaactaatttttgtatttttagtagagacggggtttcaccatgttggccaggctggtctcaaactacttacctcaagtgatcctcatgccttggcctcccagagtgctgggattacaggtgtgagccaccaagcctcgccccaggagttccaagaccagcctgggtaacatgacaagatgccattctacaaaaaataaaaaaattagccaggtagggtggtagtcccacacctgtagtcccagcaactcaggaggctggccctgggaggactgcttgagcccaggatgtccagactgcagtgagccgtgattgcaccattaccctccagcctgggtgacagaaccagatccggtttcaaaaaaagaaaagaaaaagtgcttacttacctaacgcactgcctggcacatagtaggtctacatggatggggctattgttgtttatctggctggttcctttgctatcagggacaaaagctaaccagaatgaaagtgctttcacgttacacacttaagccttatgagggaggcattgctataatccccattttacagagcaggaaactgaggctcagatagctgagcagaacactctcactggaggctgtaaagtgaggagttaggtgttctgggttgggaacctgggtctctctcccatccttacctctcctcagtccctctaccccttgcctttctctcctgtctaccatggtgtctggcagctgccggccagtatggagctggttcctgtggcgacctcctagaatcctgcaatgcaggagttgctcattatatatatatttttacaccgagtctcactctgttccccaggctggagtgcagtggtgttatctcagcttactgcaacctccacctcccatgttcaagcgattctcatacctcagcctcccgagtagctgggattacaggcgcgcgttaccacacccggctaatttttgtatttttagcagagatggggtttcaccatgttggccaggctggtcttgaactcctgacctcaggtgatccgcccacctcggccacccaaaatgctggcattaaaggtgtgaaccaccatggctggcctcgttaagagtattaattcagtacctgaaagccaaagttgtaaaaaggcctctctttgggtatgaggggctcaaacaaggcttacttttttttgggggggtgtaagagataaggtctctctttgttgccgaggttggagtggaggggtgcagtcctagctcattgcagcctcgaactccagggctcaagcaatcctcctgcctctgcctctaaaagcactaggattacaggtgtgagccattgcgccgagcctggattttctaaggatgtggtccgagtgggaacagcccagttagttcagccctatagctggaagtccagatcactggctctgggggccaaggcctgcctgctgggtcttttgttttacctgcgtagcttttgtttttaataagactttccagtgttagatttccagtcaatatccggatttcttgtggctctaagacactcagatctatagagttctgagttgtcatgcaaaggctgtgggcctaaggcctggttccaccatgtctggctgtgcgactcggccacgtggatttggcgttctgggcctcagattccttttctgtaagctgagggtggtaactggtaccctggggcctagatgggtgattgggtgatgcgtgccgagtgcatgtgtcttatacgcatggtggctgttgttgtaatcagtttcacctggcgttgctgagcctttgtcccttgtggcagtaatggcttcgatttcagaagcaccagtcactgtcccatcagactaagagtggccactccagctgccacagtccccactactccctagcactcacccaggcctagatcattttgcttggagcctcctggccctggaacctttgagtttgagacccctggcttgtctgcggtgcaccagcagatagaactttggccctaaggagaaaggagggcatcactccctcttgacccttgtcatttagcctcaggggctggccagaaggaaggccttaggcattcccgcaccctagcctcccgagtagctgggactgcaggcacccgccaccacgcctggctaatttttgtatttttagtagagacgaggtttcaccatgttagccaggatggtctcaatcttctgaccttgtgatccgtccacctcggcctcccaaagtgctgggattacaggcgtgagccaccgcgcctggcctgagatagggtcttatactgtcacccaggctagagtgcagtggcaccatctctgctcactgcagccttgacctcctgggctcaagcgattctcctacctctcagcctcctaagtagctgggactacaggcacgtgccaccacgcttggctaatttttcattttttgtagatacagggccttgctgtgttgcccaggctggtctcgacctcctcgcctcaaatgatcctcctgcatcagtctcccaacgtgctggcattacaggtgtgagccactgcgcccagcctcctcttcattaaaatacaagttataatagcacttctttccctttcttttttttttttgagacggagtctggctctgttgcccaggctggagtgcagtggtgcgatctcggctcactgcaatctcgcctcctgagttcaagtgattctcctgtctcagcctcccgagtagctgggactacagttgcgagccaccacacctggctaatttttttttttttttttttgagacggagtttcattcttgttgcccaggctggagtgcaatggcacgatcttggctcaccgcaacctcccctcctggtttcaagccattctcctgcctcagcctcctgagtagctgggattacaggcatgcaccaccacgcctggctaattttgtatttttagtagaggcggggttttcccgtgttggtcaggctggtctcgaactcccgacctcaggtgatctgccggccatggcctcccaaagtgctgggattacaggcgtgagccaccgtgcccggctaatttttctatttttaatagagatggggtttcgccatgttggccaggctggttccaaactcctgacctcaagtgatcttcctgccttggcctcccaaggtgctgggattgcaggtgtaagccaccgcgcccagccccgtcttctttaaaataggagttataatagcacttctttccctttcttgaatagggattaagtgagacagtttggagtgcttggcatagaagaagtgcttaaaacattaggtgttgttcgttcattaaaaaatgtttcctgagtacttttactgtgtgcctggggacatggccctgagcaagttaccagaacttctgctctggaggagctggcctttcagcaggaagcaaataaaggagaagcatgggccacttagtggctcaggcccacaatctcagctctttgggatccaggcgggaggatcacttgagcccagaagttggagaccagcctgggcaacatagaccccgtctctacaaaaaataaaaacattagctgggcatggtgacacctgtagtcccagctactcaggaggctgaggccggaggatggcttgagcctgggatttcaaggctgcagtgagctctgatcacgctactgccttccagcctgggcggaagaacgagacctcgtctcaaaaaaaaaaaaaaaggcgataagtatgatggaaaaaaggatcaaggagcaggatgagggagagatcacagttggagggggtacattttattttattatattattattctttgagacggagtctcactctgtcttccaggctggagtgcagtcacgcgatctcggctcactgcaacctccgcctcccaggttcacgccattctcttgcctcagcctcccgagtagctgggattacaggcgcctgccaccaggcccggctaattttttgtatttttagtagagatggagtttcaccatgttagccaggatggtctcgatctcctgacttcgtgatccgcccgcctcggcctcccaaagtgctgggataacaggcgtgagccactgcgcctggccagagggggtacattttaaatagggaaattggtgacatttgagcagagccttgaaggaggcgaggaaggaacccctggagacgggaagagaatccagtgcaaaggtcctgatgtgggaggatgcccggaggccagtttagcaggccagtggagggagatcagatctgggagatattagggtgggaccaggcctctaggaacattgtgggcagggaggctgtctgagcagagggaagtaaagctggtggcgctactgctgtccctctggacctggccaagctgagggctctctcctttgatttccagcttcaactcagttttctcagtaagcagactccacaggcatgtaggcgccccgtgccatttttcttttaataagaagcagctgtgccggggatgctggcgtttccagctgcgtttttatttggcctttggtgatgtgtccctccagggatatgtggatgagccgcgggggcactgcctgtgcctcagtgggtgctgcaccagtgcacatcggatgcccgttggctcctgtccctgacagatggaggggcacgtgatgtgttccttgggctggtttgtccctttaacagatcttattagtttagagccacttggaaatgacatcttctgtttccagtgactttccttttgggcaaagacaaattgcatcttgaaaaggccatacatggccgggcatggtgactcacacctgtaatcccagcattttgggaggccgaggcaggcagatcacaaggttgggagtttgagaccagcctggccaacatagtgaatcccgatctctactaaaaatacaaaaattagccaggtgtggtggcgcatgcctttagtcccagctatttgggaggctgaggcaggagaatcacttgaacccaggaggaggaacttgcagtaagcggagatcacgccattgcactccagcctgggggacagagtgagactccatctcaaaaaaaaaaaaaaaaggaaaaaaggaaaggccatgcaaggctcggttagggtggtctgcagtgctgggcctgctggaattggtacagtccagagggatctgtgggaatatggaaggcttggttctgccacacaccaaaaaagtgacctcacttctctgggcctcagtttcctcatctggaaaatgggaacatggtggtctctgcctactgggagtggactgagaatcacgtagcaaattgttgtgaaacaggcagcatttgtgatctcgttggttggcttttgtctccttttatctgggatcaggactctgatgacaggtgtacgtttcttttctcttgctctgtcccccagactggagtacagtggcgtaatcatggctcactgcagcctccaactcctgggttcaggtggtcctctcacctgagtctcctgagtagctgggactataggcatgagccaccacacctggctaattacaaaaaaatttttttggcagggagcgatggctcacacttgtattcccagcacttggggaggccgaggcgggcggatcacggggtcaagagattgagaccatcctggccaacatggtgaaaccctgtctctactaaaaatccaaaaattaggtgggtgtggtggctctcacctgtagtcccagctgctcgggaggctgaggcaggagaatcgcttgaacctgggaggcggaggttgcagtgagccgagatcgtgccactgcactccagcctgggcgacagagcgagactctgcctcaaaaaaaaaaaatttttttttttttagagacagggtcttactttgttgctcagtttggtgtcaaactcctgggcccaagcgatcctcctgccttggcttcccaaagtggtggaattacaggtgtgagccgccgaacccggccttagtttctttttccttaaagagaaggaactcatcattactctgttgatataaatggagtgcctatcagtgcaggcaatgttcttgctctggggatacagccaggaccaggacatgcaggcacgccctgttccccagatcctgaaatatcgaccagaagttgttcctggttcctttctaagtgggaatcatggctgcaaacaagtaattggccgtgagagttatttacacacattttgtgtacggtgatgagaaatgggagaaaaaatgcccagcatcggatcaccagaggtcaggagttcgagaccagcctggccaacatggtgaaccctcatctctactaaaaatacaaaaattagccgggcgtggtggcaggcgcctgtaatcccagctattcgggaggctgaggcggagaatcgcttgaacctgggggacggaggttgcggtaagccgagattgcgccgctgcactccagcctgggcaacagagcgagactctgtctcaaaacaaacaaacaaacaaaaaccaatgataggggatttggccagataagcgtgtccagacaaccgactatcaactcgctactcagagggatctagaagaatctttaatgacccagaaagctgcacaagacctgttaggtaccagatgaaatgggctgtgggatcctgtcttgtttaaaacgattgtatttgctcagtgaaaagaccggaaagacatactctgccctaaccccacatgtgaatcgtctccccatgtgattcttggtttgtttttgctggtttggggattaggtttataatcaggaagacagatttctccaaagctgcgctctaggctgtccaagtgctttttcagagttacttattgacggataacagcccttgataggttcataacattgaaatcccctggtaataacctggattgtttctggatgagggcggaagatggccttggggacagttgtagatttagagaggaggttttcttttcttttctttttctttttttgtttttttttgagacgggatctcactctgttgcctaggctgaaatgcagtggcgtgatcacagctcacagcaacctcaacttcctgggctcaagggatcttcccacttcagcctcccaattagctgggaccacaggtgtgcgccaccacccccagctaattttaagaaattttttgtagaggtggggtctcattattttttgcccaggctagtctcaaacccctgggctcaagtgattctcctgcctcggcttcccaaagtgctgggattacaggcaagagccacggcacccggcctaggttagatttagagttttcagagttggcttaggcggtagaggctggcctttgaatggaaccctgtctcgctgtcgctctcagcgtttatatttggctcagagccacatctgccaaacttctgcccgatttgaatgaaagtgctgaaattataggcccctcggctgctgaaaaaaagtgagaacatcatgtaaaccgtaatttactgggattgccaactacaagctgtaattaagcccttattgtgttaaagctttggaaaaatccaagccaataatgagatatttatagggcattagctacaatctgaataaagggaaaatgtggccctgcgtctgaagcaggactgcaaagagaggaaagacgcctgcttccgggtgcgttttgggtttctgtgaatattggtaactaggtccctgctgggtggtgggaaattttcccctgtggcgtcacccgtagcttgaaccgggagctggatgactgtttcagtttcatctgctgctggacatttatgatgttaagagccagtgtttatggagaatcaccgtgtgccacatgtgcaagatctgaccagtgtcttctctgcccaggggtggcagctgctgctcttagcatccctgctttataggtagagaaactgaggccagagagggagactggcctgaagtcacacagggaggaggacagaggagttggagcttgaactggatgtgggccctctagagccacacatatggcggctttgggtgggaaggtgtgggcctgactcttgagagcagggctgaatggtgggcaccatggcgtttgtatctgaggactgggccaagattacagagggagtgagcaacgcgtggctttggatatgcatcgaggttgtcagctctgtgtccagcctgcgtgtggtaagcagcaaccactctacaccagttgctgggcacccagcagggactgggacagacaggacaggtgaacagttaaatgagcaagaacattctggggcaggcacaggggctcacacctgtaatcccagcactttgagaggccaaggcgggcagatcacttgaagccaggtgttcgagaccagcctggccagcatggcgagccccatctctaccaaaaatacaaaaattagctgagcatggtggtacttgtctgtcgtcccagctacttagcaggctaaggtgggaggatctcctgagcccaggaattcgaggttgcattgagctatgattgcaccactgcgctccagcctgggtgacagcaagacccggtctcaaaaaaaaaaaaaggctgtatgcggtggttcacgcctgtaatcccaacactttgggaggctgaggtgggagttcgagaccagcctggccaacatggcgaaaccccatctctactaaaaatataggcaggagaatggcgtgaacccgggaggcggagcttgcagtgagccgagatcgcaccactgcactccagcctgggcgacagagcgagactccgtctcaaaaaaaaaaaaaaaaaaaaaaaaaatataaaaaattagccaagcatggtggcgggcacctgtaatcccagctactcgggaggctgaggcaggagaattacttgaaggttgcagtgatccgaggtggaggttgcagtaatccgagatcatgccacggccctccagcctgggcaacaagagcgaaactctatctcaaaaaaaacaaaaataaaaatattctgaagagtgagaagcggtttgccctgtactgcattgggtgggggaatggctgcagggggctgcttcacatgtggcttgttgggatgggtgtcctgcagtggaatagccccgccaggacttgggggaacagcatcgcaggccagggaaacagcaggtgcagaggcctcgcacacacccggcccgctgagtgccccctgcggaccggaaaggaccagtaggcacgtgagagttaggacgctgcccgtggaatgccgacttttctaaatttgaattacgcaagtagagcgtggagacagtgttcttggaaaaagggaaaccattacagatgaggaagagcacactgcccagcccgtcccttcctccagctctacctgggagcaccactgtcacttcagggtatgtctagccagacccctctggtgtttctgtacttaggtacatgctggtacctatagagaatacgtggcaccattatgggtggttattttttttttttttggaacaggtctcactctgtcacccaggctggagtgcagtggcacagtcatggctcgctgcagccttgacatcctgtgctcaagccatcctcctacctcagcctcctgagtacctgggacaacaaccacatgccaccacgcccaactaatgtttataatcttttgtacagatggggtttctctatgttgccaaggctggtctcaaactcctgggctcatgcgatcctttcacgttggccccccaaagtactgggattgtagacatgagccacctctcccagccacgtgcatatatttgttgaatgaaagtagctaaaggctggaagtggtgactcacgcctgtaatcccagcactatgggaggccgaggcaacatggcttgagctcaggagtttgagaccagcctgggcaacatggtgagacctcgtctctaccaaaaatacaaaaattagcaggcgtggtggtgcatgcctgtactcttagctacttggaatcccgaggtgcgaggatcccttgagctagggtagcggtggaacttgcagtgagcccacactgtgccattgcactgcagcgtgggtgacagagcgagaccctgtctcaaaaaaaaaaaagtagctaaaaaccagaatggagtgaatttcactgcacagtcatggaggggaccaggcagaggacagccctgggtcttggttttggagactcacagcctgcctggggatgcagggaccctgaagcaaggacatcttcctttggaggaagtggagatttgctccatctatataaagagtaataacagtaataggctgagaccctgaggctgggcagcgtgggtgtctatctgcgttggcttcgagggctgtaagatggggctagcagcgtcccctccagggtgggagtgaggccctgtatggcaacctgcggggtgccccctctgacttttgcttcctgcctggctgctcagtggccctggcaggggcaggcaccactgctctttctgttacaagagacctcctttggataaatctgaacacgctcccatggcagacctatggggcggtagacaagaggccagcagagctgtcccaggccctggtgacacctccatgcccaggtgaaggaggagcaggctacttggagcctgccctgtgacacactttcgcggtgatgagagcttctcagggctgcgatcctggcgggccagtcaagcgggcaggagcagccccagccagggtgaccctgcctgctgggtgatacgccctggcacgaccaggccagccctggggaaagcccccagggcggatcagggagggacacagctgtcctggccatgagacttctgtcttttgtatggatacacagggtccttctagagggtcacagcctccacccccgggaggcctaccagctggccgcgcagccaggatcctgcagccaccaggacactgcctttccaggttgttcttttcttttccttctttttttttttttttttgaggcagagtctcacagtgtcgcccgggctggagtgcaatgcatgatctcagctcactgcaacctccacctcctgggttcaagtgattctcctgcctcagcctcctgagtagctgggattacaggtgtgcaccaccacgcctggctaattttttgtatttttagtagagatggggttttgccatgttggccaggctggtctcgaactcctggcctcaggtgatccacccgcctcggcctcccaaggctctgggattacaggcgtgagccgccgtgcccggcccccaggttgttcttttctacatcaacatcaggggacagtgactgagagaggccacgagccactggctcagcttgacgaaggcttcctgtggtttgggttgatgtatctctctgtcttgcaacactgagttccccgttgtctgggcggaagccagtcagacggaagcccggcttctgtggtgcctgccctggtggcctggacaggttgctgggaagctcaggtcaggctgctttctgaggtggggaggccccacctggaatgtgctcccagcactgggtgaaaattgatgcacaggcttgattttttttttttttttttgagacggagtttcgctgttgttgcccaggctggagtgcaatggtgcaatctcggctcgctgcaacctccgcctcccaggttcaagcgattcttctgcctcagcctcccgagtagctgtgattacaggcgtgcaccatcacacccggctaattttttgtatttttagtagagactgggtttcaccatggccagactggtcttgaactcctgacctcaggttatccgcctgcttcagcctcccagagtgctgggattacaggcatgagccaccgcgcccttaaactcttttctgttaaaggagttattcaactgtttactcgttgtggagaaaaaaaaaaaaaaaaaaacaggccgggcggtggctcatgcctgtaatcccagcactttgggaggccgaggcgggcggatcacgaggtcaggagattgagaccatcctgactaacacggtgaaaccccacctctactaaaaatacaaagaattagctgggcgtggtggcgagcgcctgtagtcccagctactcgggaggctgaggcaagagaatggtgtgaacccaggaggcggagcttgcagtgagccgagatcgcgccactgcactcccgcctgggtgatagagcgagactccgtctcaaaaaaaaaggaaaaacaattcaccctgtccggaagtgcacagagtaaggctgggtgtcctttgcatgggaacgacctctagcagtctgtggctcttgccagattttttatatatatatatatatttctaggtgtgactacccccgactcatccaaccagtgagcctataagtctagtaacaaacgctcccgctccacagtccaaagtctcaacagaatgtgactgtcttgcaccaggtccctgctatatttagtgcctccaagaatgtttggcttttgttttctgttttttttttcttttgagacaaagtctcgctcttgttccccaggctggagtgcaatggcgcgatctcggctcactgcaagctccgcctcccaggttcaagcgattctcctgcctcagcctcccgagtagctgggattacagacacctgtcaccatgcccagctaatttttgtagttttagtagagatggggtttcaccatgttggccaggctagtcttgaactcccgacctcaggtgatccaccctcctcggcctcccaaagtgctgggattaccagtgtgagccaccgcgcctgggctggtgtggtttttttttttttttttggagacagggtcccactctttcacccaggttggagtgcagtggcatgatgtcggcttactgcaacctccccctctcgggctcaaaccattctcccaccacagcctcccaactagctgggaccacaggcgcgcaccacaatggccggcattttttttttattttcggtagagacagggtttctccatgttgcccaggctggtcttgaactcctgagctcaggtaatctgcctgcctcagcctcccaaagtgctgggattgtaagcatgagccacaacgccctgcctagaaataattttagatttagagaaaataaataagcttcaaatttacagaaagtacaaagataacacagagagctcctgtacatccttcaccagtgtcctctaattttatatttcttacaaccaagaaattaacctagctactcaggaggctgaggcgggaggattgcttgagtctaggagttaaagcccagctttggcaacataacctcttctctaaaaataaatgaatgaggccggacatggtggctcacgcctgtaatcccagcactttgggaggcagaggcaggtggatcacctgaggtcaggagttcaagaccagcctggccaacatagcgaaaccccatctctactaaaaatacaaaaaattagccaggtgtggggacatgtgcctgtagtcccagctatttgggaggctgaggcaggagaattgcttaaacctgggaagcggaggctgcagtgagccgagatcgcgccactgtacttcagcctggacaacaaaaggagactccatctcaaaaaataaaaaaaaaaaaatgaatgaatgaaattaaccttggtatactactattaagtgaggcctggcgggatgttgtggctcacactgtaatctcagcactttgggaggccaaggtgggtggatcacttgaggccaggagtttgagaccagcctagacaacatatcaaaaccctgtctctacaaaaaattgagtgtggtggtatacacctgtagtcccagccactcgggaggctgaggtaggagaattgcttgaacctgagaggccaaggttgccatgagctgagatcaagccactgcactccagcttgggcaacagagggggactctgtctcaaaaaaaaaaaaaaaaggaagggaggccaggtacagtggctcacacctgtaatcccagcactttgggaggctagattgcttgagcccaggagttttagaccagcctgggcaatatagtgagacctcgtgtgtagaaaaaaaaaaaaattagcttggcctggtggtgctcacctggagtcccagctcctctggaggctgagacaggaggatcacttgagccctggaggttgaggctgcagtgagtgatgattgcaccattgcacaccagcccgggcaacagagccagaccctgtctcaaaaaaaaaaaaaaaaaaaaaaagccaaagccagaatgtacagatttcttcaatttttcccatatgagactaatttaaaaaaaaattttttttttttatcgagatgggggtcttgctgtctggaagtatacatactgagaaattttatttttcaaacaaaatcaccccttttcctgtcttaggactggacattgcatctagttgtcggatctccttaagcctttttctggtctgggaagcaactcagcccttccttgttttttataaccttggtaagtcatggaatgtccctcaattagggcttatctggaattcttcatggtgagcctggggtgtgagttttggggaagaaggccattggtgaggtgcccctctcttctgtgaatctttttttgtttgtttgttttttgtttttgtttttttgagatggagtcttgctctgtcgcccaggctggagtgcagcggcgcgatctcagctcactgcaagctctgcctcctgggttcacgccattctcctgcctcagcctcccgagtagctgggattacaggctgccaccatgcccggctaatttttgtatttttttttagacggggtttcaccgtgttagccaggatggtctcgatctcctgacctcatgatctgcccgcctctgcctcccagagtgctgggattacaggcgtaagccacctcgtccagccatcttctgtgaatcttatcaggagtataggataccaacaagactgataaattattgacagtgataactgatgatgctgaccttgatctcttggctgaggtaggcttgctaggtttccccactggaaagttactagttttcttcttttcatactctatcctttgggatcatggaaaattttatttttattttatttttggagagtctcgctctgtcatctaggctggagtgcaatggtgtgatattggctcactgcgacctccgcctcccggattcaagcgattctcctgcctcagccgcttgagcagctgagactacaggcgcccaccaccacgcccggctaatttttttttttcaagagatggggtctcgctgtgttgctcaggctagtctcaaactcctagactcatgtaataatcctcttgcctctggctcccaaagtgctgggattacaggcattaaccactgtgcccggccttttctggcactattgaaaagaccatcctttctccctaaagttgcttttgtctggaattagttggccatatttgtgtgggtccaacctgaactgtctgttctgtgacgttgatgtatggctctgtcctttctccaaaaccacatatctttcttctctttttagatagagatgggggctgggcacagtggctgacgcctgtaatcctaacactttggaggcaggtggatcacttgaggtcaggagtttgaaactggcctggccaacatggtgaaactccgtctctactaaaaatacaaaaaaattagctgggcgtggtggtgggtgcctgtaatcccagctaattgggagactgaggcaggagaatcacttgaacacgggaggtggaggttgcagtgagccaagatcgcgctattgcactccagcctgggcaacagagtgagactctgtctcaaaaaaaaaaaaaaagaaaaaaagaaaaaaatagagatggggtctcacaatgttgcctaggctggtttcaaactactgggctggtgatgctcctgcctcagccttccacagtgctggcattatgggcgtgagccaccacgcccactcatttctatattgctgtagctttatagtaagacttgaaatcaggccatgtgagtcctcttttttcttgtttctcaaaattgttttgtctagtctagttcctttgcctccacatatatattttagaatcagcttgttgatttcatagaaaagatcattgtgtattagtacgtggaaagccacggtattagttttttgtttgtttgtttgtttgtttagacaaagtctctctctggcacccaggctggtgtgccaatagtgttgggattacaggcgtgaaccactgtgcccagctggtactggtttttataactgtgtattattccatccactgtcactacttccccaggaccagtacagtttctgcctcctcagtcttgcacctttaaccttgtcctcacccccaggctgttctccctgcagtggacagagggagcctgttaagaatatccttcctagctgggcgccgtggcttacgctgtaatcccagcactttgggaggccgaggtggaaggatctcttgagcccaggagtacgagaccagcctgggcaacataacgagacccccatctctacaaaacatttaaaaattagccaggcatggcagcgcatacttacagtcccagctactcaggaggctgaggtgggaggattgcttgaacccaggaatttgaggctgaagtgagctgtgatcctgtcagtgcactccagccggggagacagagggagaccctatatccttcctctacttggaatcctccctggccctcagttccctcagggtaaaaatgaagtcgtccctgaggctccatgatgttctcatgcaggtgaggcgctgtcctacctcatggctttttcacatgctgcttccactgcctgcactgcccttcccccagataaccctgtggctcatttcatcagcattctaaggcctctgcttaaaagcctccttctcaaaaggctctccccctggccactctgctcaaacgccccaccctgttctctctgtccccttcccctgcttaatttttcttggaaccacttgtcattcctgtcattgttccacctatgcgtttggtttcttgttttctttttttggggtggagtcttgctctgactcccaggctggagtggagtggcgatcttggctcactgcaacctctgcttcccgggttcaagcgattctcctgcctcagcctcccaagtagctgggattacaggcgcacgtcaacatgcccgtatatttttgtatttttagtagagacgaggtttcactatgttggccaggctgatctcgaactgctgacttcaggtgatctgccagccttggcctcccaaagtgctgtgattacaggcatgagccaccgcacccggcctatttgtttgatttctctttctgtctccccccactagaaggggaatgccccatggtagggcggtgcccctggctgtagcgcagtcccttgcatggtgcctggcatgcgataggtaatcggggcacccatctccctctcgggatgcactcattgatgtacttgtcaatcactgagcaagacccactcagcaatgtctgctgagcctgctctgtgccaggctctgacctgaactgccacccttctggagtcaaacaggcctggttgccaccaagaggagttaggcctggcagaggagacaagcattagtctcacaacagaaggaagtaggccggacgtggtggctcatgcttgtaatcccagcactttggaaggccgaggtgggcagatcatctgaggctgggaggtggaggttgcagtgagccaagatcacgccgctgtactccagcttgggtgaaagagcgagactccatctcaaaaaataaataaataaataaataaataaaaaggaagtggagactttcattgagatcagtatcaaagggcacgaggtggcagggcatggtggctcacgcccatagacccagcactttgggaggctgaggtgggaggattgcttgagcccaggagtttgataccagcctgggcaatatagtgagacctcatgtcaacaaaaacagacaaaacaaaaaaaacaggggagggagggctacaggagggtgggatgaggactggccacagttggaggccaggcccttcctggggatcccagcggttgttactctttaagaaggacctggcctggtgtggtggctcacgcctgtgatcccagcactttgggaggttgaggcgggtggatcacttgaggtcaggagttgaagaccatcctggccaacatggcaaaaccccatctctatgaaaaatacaaaaaaaagttagttagctgggcgtggtggtgggtgcctgtaatcccagctacttgggaggctaaggcaggagaagtgcctgaacccaggaggcagaggttgctgtgagctgagatcgcaccgttgcactccagcctgggcaacaagagcaaaactccatcgcaaaaaaaaaaaaaaaaggctgggctcagtgactcacgcctgtaatcccagcactttgggaggccgaggtgggcggatcacgaggtcaggagattgagaccatcctggctaacacggtgaaaccccgtctctactaaaaatacaaaagattagcggggcgtggtagcgggcgcctgtactgtagtcccagctactcaggaggctgaggcaggagaatggcttgaatcctggaggaggagcttgcagtgagccgagatcacgccactgcactccagcctgggcgacagagcgagactccgtctcaaaaataaataaataaataaaagaaggacgtgttcccttgttcttctatggggacatggggaactcctgtactgttttattttcctgaaatatttttattgaaatataattcacataccataatacctaatccttttgaaatatactattcagtggattttagtatattcacagttgtgtaaccagcaccactatctgattttgtagcactttcatttcccctaaacccatacatatgaagcagttcctccctcccccagcacctggaagccactaatgtcctttctgtctgtgaatttgccaattttggatatttcctataaatggaatcttacagtatatggccttttgtgtgtggctttgtttatttagcatcatgttttcaagattcatccatgctggttgggtgcagtggcgcacgcctgtaatcccagcatttgggaggctgaggcgggcagatcacttgagggcaggaattgatgagaccagcctgcccaacatggtgaaaccccttctctactaaaaatacaaaaattagctgggtgtagtggcacatgcctgtaattccagctactctgggtggctgaggcacgagaatctcttgaacctggggggcaaggttgcagtgagccgagatcactccactgcactctagcctgggcaacagagcaagactctctctctctctcaaaaaaaaaaaaaaaaaaaaaaaaaagaattcaccaatgaagccacctgggcctggacttttctttgtgggacgttttttgaatactaattaaatttcttgtacatctattgagtttttctgtgtcttcttgagtcagtttcagtaatttgggtctttctaggaatttgtccatttcatctagggtgtatttaatttgttagaatagtattcccttatcatcttttttatttctgaaaggttggtagtgatgtctcctctttatttctgatttttgtaatttgagtcttatctctttttctcttggttaatctagctaaaggtttgtcagtttggttgatctattcaaagagcaaattgtggtggtgttaacttctctctccatttttttagtctctttatttcttctctaattatttccttcttttctctttggatttggtttaccctccttttctgaggttcttgaagtggaagattattgaaatctgaaagtatttgaaatctttctcttttttttgttttttttttttgagacggagtctcgctctgtcgcccaggctggagtgcagtggcacgatcttggctcactgcaagctccgcctcccaggttcacgccatcctcgtgcctcagcctcctgagtagctgggactacaggcacccaccaccatgcctggctaatttttgtatttttggtggagacggggtttcaccatgttggtgaggctggtctcaaactcctgacctcaggtgatccacccacctcggcctcttaaaagtgtggggattacaggcgtaagccaccgcgcccggccaaaatcttccttctttttaaatacagttgcttacatctatgaatttccctgtaaacctgctttagctgcatccataagttttgatatgttgtgttttcattttcatttatctcagcatatcttctcatttctcttatgatttcttctttgatacataggttatttagcagtatgttcatttctatatatttgagaatttctgaaaaacatctttcttgtgttcatttctaacttcatttcactgtggttggaggaactactttgtatgatttcaatctctttaaaattattgagtcatgttttatggcttggcctcgaatacggtgtgtcctggagaatgttccatatgcacatgataagaatgtgtattttactcttgggtggagtgttctgtacacatctgtcaggtcttattggtttcgtattttctatttccttgttatcttttatttggttgttccatccattattattatttttcttgcctgataccaatgctgatatccatccatgattgaaagtggggtattgaagtctccaactttctttctttcttttttcttttctttttggagacacggtcttgctctgtctcccaggctggaaacgtggtggcatgatcatagctcactgtagcttctgtctcctgggctcacatgatcctcccacctctgcctcccgagtagctgggaccacaggcgtgtgccacacccgactaatttttgtattttttctagaggtagggtcttgctatattgaccaggctggccttgaactcttgggctcaagtgatcctctcatcttggcctcccaaagtgctgagattacaggcatgagccactgtgctcagccccaaattggccaatatttctttcttttttttttttttttgagacagagtcttgctctgtcgcccaggctggagtgcagtggcgcgatcttggctcactgcaagctccgcctcccgggttcacgccattctcctgcctcagcctcccaagtagctgggagtacaggtgtccgccaccatgcccggctaattttttttgtatttttagtagagacggggtttcaccgtgttagccaggatggtctctatctcctgaccttgtgatccacccgcctctgcctcccaaagtgctgggattacaggcgtgagccaccacgcctggccaatatttcttttgttctgtgctttttccttcctccctcccttcctctttaccttcctctttaccttcctctttccctccctcccttctttccttccttccttcctttttgttcttgttcttttctttttcctctacccttctttcttttccttctttctttttttctttctttgtttttgcttgattgcagcatcatgagagagtcctgtgcttttttatagctgcaagtattcctgggtcgagcctactcccactaacactgatcactctcccccttgaatttttaggttatttctagtttttcccctcctgccagagacttgggggtccgcaggcttgtgtgtctgctatgctcagggtggataccctgcaagggagtgccatgttgcatcagaagtggatttagagtgatgttgccaggcccaccaggaaaggctgtgccaaggctctttgctggggtgccaagaagaagggtctgtgcctgttgtggtgccaggcattgacatccttcactcccacccccgtcaccctcatgaactagtgaactagtcctgtggaatagggccttatgcgtgctagaccctgggtttgtcctgctgacaaccccatagtgtaggtgctgttatcccaatttcatagagaaactgagggctggggaagtggcagccttcattcagttcctgccgtgaggctgtggctgagctgccaggctgcagagtcttcacccaatgatcttgctcagttgtccccatgaggaagctgagcctggccttcctgtctctggagtccaaggtttcctttccttgtgtgcccctggaagtgctgtgtggtgaccgggatggtgcctggcagatggagattagacgcaggttggattggtgcctcattggtcaggagggctgctcttagctgtgtgccaatagaccggatgacttaatctctctatccttggtttccccatctgcaaaacagggttggccagagccctgtgaaggtggaagaaggccctgtgtgcctggagctttgtgcagtgccctggagatgctagcttgtttttctttcttttttttttttttttttgagacagagtctccctctgtcatgcaggttgtggtgcagtggctcagtctccgctgactgcagcctcaacctcctgggctcaagtgatcctcccacctcagcctctcaagtagctgggaccacaggcgtgtgccaccacgcccggctaattttttgtagaggcgaggtttcatcatgttgcccaggctggtcttgaactcctgagctcaggtgttccgcctgccatggcctcccaaaatactaggattacaggtgtgagccaccacgcccggccgtgatgccagcttcttttgccgtgcagctagcatttgctgaacacctgctgtgtgccagatagtgtgctggaggcagggcagtgaacaagacagacgagatccctgtcctgtggagctgatgctctagctgggggcctgaggggtgggaaggaagcacaggtgctcgggtgagaaaaaacatcatgcggccaggcatggtggctcacacctgtaatcccagatctttgggaggctgaggcaggcggatcatctgaggtcatgagttcgagaccagccttgcaaaaccccgtctctactaaaaatacaaaaattagccaggtgtggctgggtgtggtggctcacacctgtaatcccagcactttgggaggcggaggcaggtggatcacaaggtcaggagatcgagaccatcctggctaatatggtaaaactccgtctctactaaaaatacaaaaaattagccgggtgtggtggcgggtgcttgtagtcccagctactcaggaggctgaggcaggaggatggcatgaacccgggaggcggagcttgcagtgagccgagattgcgccactgcactccagcctgggtgacaaagcgagactctgtctcaaaaaaaaaaaaaaaaaaaaaaaaaaaattagccgtgtgtggtggcgtgcgcctgtagtcccagctacttgggaggctgaggcagcagaattgcttgaactcgggaggcaaggttgcagtgagccaagatcacgccattgcactccagccagggcagcagagcgagactgtttccagaaaaaaaaaaaaaatacaaaaattagccagacgtggtagcatacgcccgtagtcccagctgcttaggaggctgaggcaggaaaatcacttgagcccaggaggcggaggttgcaatgagccaagatcctgccactacacttcggctggggtgacagagccagactccatctaaaaaaaaaaaaaattctttaaaaatcaggcacacagtgtgatctgacttgcagttttccaagcctgtggggcagggagcctgggggaggctttgccctgagatgggagacttggcctcaggacattagagcgaaacagaggaggaggggatgggtctggatatccaaggcaggatctgccgagagatacgctgtgggggtgggacaaagacctcaagaacgggtccgggctgttcctgtcacttgtgacattgtggactgagtctgcctggatatttccttatgggctggctccccatcaccccgggagagtctcggggtggagggaactagaacgtgtttgcctggaggtcactacctactcccctggaaggaaggggctccaggaggctggctgtggaatgcagactgtgggtggtgcccggctgcctgcctctagttcacttgggccctcagggtggtacagagctggaaatccatacatggctgaccaccctgtaagggctgcagacacagtgagcgttcactttgccctggcaactggaactgtctcctccagtcctcaccacaaccgttttacagagcaggacacctgttgcaagatgggagagactttgctaacaaggtcccacagctggcactcaccaggctggctggggtactcaggccaccccttgcagtggggagcagttaggatgacaccgaggacacccctaggagggcggagttgtgagctccaggaccccacatttgagcagtttccccgtcactcttgaaaatgctgctgggccggccagtttctttggggtttctcagtactgctgaaagttacaaggtcaacactggcctgcaatcacagttataaaaaagttataaaagcctgacattcaaatcacgttggagactataaaacagcaagtttttcatttgcacacctcacatgacctcaagcctgctgtccatacacaggaaatggggatgtgcggaaaaaaaacccgaagtggaggacatcatcccccacgcataatccagtccgtgcatcgcacttgaccttcggcactgcagcctgcattgctccccggactagctcccaagattgatttagccagttccctgccagtggacatttaggtcattatcggttttcattccacaaagtactgccctcagggagtcggctgtccttgccaaaccactgcattaatatgtttctgggtgctggggaaagggcgcttaagacccctgccctcaaggtgttgatattctagttgggactgttagataaatgagcaattaggctgggcacgcttgaaatcccagggctttgggaggctgaggtgggaggatcgcctaggcagcatatcactacagaaaaacacaaataaaaaaagttagctgggcgtggtggcaagtgcctgtagtccgagctactcaggaggctgagggaggaggatcgcttcagcccaggagtttgaggctgcagtcagctatgattgcatcactgcactccagcctggatgacagagtgagatcctgtctctgaaaaaagaggtgcaaataaaccagaaaagtaccaactagtgggcagtgctgtgtttagaaggaaaacagggcaacatgaaggggaggtgggcatcagtaggggacagacctctctgaggaggtgacatctgagttgagtccctggtaaccggagatagccaggattgtggaaatacttggaggagatgagatggtctttcgaagcaggaggccagcatgtgcaaaggccctgcgacagcaatgtctggcctccttgctgtttctttttatttcattttttgagacggagtctcactctgacctatgctggagtgcagtggcatgatcttggctcactgcaacctctgcctcccaggttcaagcgattctcgtgcctcagcctcctgagcagctaggagtacaggcacacgccaccacaccccactaatttttctgtatttttagtagagacaaggtttcaccatgttggccaggctgctctcgaactctggacctcaggtgatccacccacctcggccttccaaagtgctggcattacaggtgtgagctaccacgcccggcctttttgctgtttcttgaccaccaatgtggctggaggcagggagtgagggggtggtgggggaggagggcacggaggtgacagggccatggggggcacttgggaactgtcaaaccgtcaaatgttatgagcagaggagggtcatgttcttacattgtatcgagttttcctttttgtttttttgagatggagtttcactcttattgcccaggcaggagtgtaatggtgtgatcttggctgactgtaacctctgcctcccaggttcaagcgattctcccacctcagcctcccgagtagctgagattacaggcatgcaccacacctggctaattttgtatttttagtagagacggggtttctccctgttggtcaggctggtctcgaactcccaacctcaggtgatctacctgcctcggtctcccaaagtgccgggattacaggtgtgagcaaccgtgccggctttttttttgttttttgttttttttttttttgagacagtctcactctgttgcccaggctggagtgcaatggcatgatctcacaatctcagctcactgtgacctctgcctcctgggttcaagcggttttcctgcctcagcctctcgagtagctgggattacaggtgcccaccaccacgcctggctaatttttgtatttttagtagagacggagtttctccatgttggccaagctggtctcaaactcctgacctcgggtgatctgcccgcctcggccccgcaaagtgctgagattacaggcatgagccaccgcactcaaccaattttttttttttttttagtagtagagacagggtctcatcatgttgcccaggctggtttcaaactcctgggctcaagagattgcgtgccaaggtgctgggattataggcacgaaccactgtgctcagcctgagttttactttgattcgatggggcgaatgttctcttttgggtatcatggtaagagtttcacaaacccttccacctcctctctgaggcaggtggcatcattcccacataacagattgggaaactgaggcacaaagaggttacctgacctgcccatcttgtccagaaaggaaatactggattccagccagggcctggagagtcccagagccacgatcacgaattgccacaggtcacctcctgcttttgctcccagcctgttgtgtcccttggatgagaccagggagcaggtgatgccacggcttgagtgccaagggcgggcctcgagccgggagctgcaggattcctgatcagggaggggctgctgggctgggaatgttggggaggagtgaggccaggagtggattgtggaagtgagaagtctcctcatctgtaaaatggcagatttggcccattgttctgcaagcattggtcatctgcctcctgcctgggtgtgtgttgggtactggggagagagcagagaaggggccgatacgggaccctgcgcccatgaggctgccactctaataggatgttgaggtgggggcagggacagactgcagctgggtgaacacatcaggaacccggaagatgccagttgtgagtggcactgagcattgagcgggttgatgtgtgaaagaaggggagcagcttcctatggcggggggagggagggtgcagtttgctgggagctgcccgcctgctctgttaatgctgcaggaagaaggttccaggctgagggaacagcctgggcaaaggccctggggcaggacagtgtctggtgtgtttcgggaacatggaggaggcatatgtggctggagtaaagccagcaagacagagagtagggggaggtgaggacaggaaggtgacaggacaggtcgtgcagggcttggggggctgcagggaaaagtctggcttttattccaagtgaagcgggagcccaaggagggcccataacaaaggggtttacagtgacatggtgtgcacaggcaccttgtggctgctttgtgggaggcagattgtggggaccaagggcacgactgcactggtgtaggcaggtgacagtgggacacgctgacagccttggacgtggagggaattgagcagaatcaggcctgatgtggaggtgaaaccagcaggactcgcggctggacaaggcgggtgggtgagggccaggggagccccaggtctgcagcctcgtgaggggtttctcccctccctgccctttggggtgaccacagggatgcagtggcacctacctgcggacactgtgtgggccgagcactgtaaggcttgggcgtccttgctgggtgaccaatggctattgttggaaggatgaggcagggaccgaggtgggcagaggagactgggcatgggtccccacttctgctccaacagagcgacagagaagcccctgaggtgggtgcgggtgactgcgggtctgcctcattggtgtcccacccacattcgtgtcctggctctgctcctccctcgctgagcgtcctgggcaagtcctgagactgaacctcagtccacctgtctgaaatgggacttttggccctggcatccttgtgactttcaacccctctggggttgtcagaggatttgccgctatgttgcccgagatggggttagagacagcctgttgggtggccagcgttccttgtgtggctcttatcagagtcctgagagaagaggccagggtggaaattggccctggagtgtgggctcctgccgaagcctcttcctgtggccagtgccatgctgaaggctggctgtggtgtcacgtgagccctcccagccacattcaggctcaaagagactgtgctgagcatatggtgacaaggaagggatcccagcccagggtcctggccaggccctgccagcaccaggctgcacaggtgaggggtggcttgccctggggtgctggctctgggccacactgctgactcaccctctgtgggcttatctgttgattctccctcccatgggaaggctctgggtttgagcctgcatcgttcctgcacgtagccgtccccaccctcataggggctggaagtcaaaaggcgcctggtggagccttgtggtctgttcaaaaaacggtaaataaacagcctgggcttctgatctgctggactcaacctggcacctctcccatcgctgctgggtgctgcctcccagctgcacccttccctgcctgtcccctaccgccttcctggagcgcttatccccttccagggagaggtggcccactttagagctctgaaacctgctctggtggggtgaagtgacttgagccaggccaagccggtggctgggccctctgtggcagactggaagtgtcctcccatttcatggatggccaagtcagtgcccagagaggggtagagacctgtccagggccacacagcccaggaggggcggagctcgactttgaacccaggctgcctggctccacagtctggattcttcttacccattcaacaaatacttaatgagcacacactgtctggcaggcactgttctaggtgctgaggatctagcagtgaccaggccaggtgcagaagtcttggcgtgtcacaggactagaccttcatcagaggccgttttgctgggagtgggaaggggtgtgtatttgggagggaggggcgcaagccatcacacctgcccatggccaggtaggcagggcctatgggagggtttcctggcagagggaacaccccctgcaaaggcctgaaggccagcagtgccagagagaactcagaggaggcaggtgcagggggtggggctggggaacccggtcagcactgggactaggactggacaggacgggctaggaccagtcacttggtttctgcaagagagaagcttggaggcaggatcttcattttagaaaggtcactggggaaggtgggaggttgggccaggaccctggggcctggcctgggcccatggataggaggccaggtactgaaatgatgcaatagtactaggctaggtgcagtggctcacacctgtaatcccggtgctttgggaggccgatgcgggaagattgcatgaggccagaagtttgagaccagcctgggcaacatagcgagaccctgtctctgcaaaaaataaaaaaattagccgggcatggtggtgtgtgcctgcagtcccagttacttgggaggctgaggtgggaagttcactagggtccgggagttcaaggctgcagtgaggtatgattgtgccactgcactccagactgggcaatataggaagatgccatctctaaaaaaaaaaaattagccaagcatggtgacatatacctgtagtcatagctactcaggaggccgagactgaggtttgcctgtaccctggagtttgaggctgcagtaagctgtgattgtgctgctgatgcagcctgggcacagagtgagatcctgcctctaaaataaataaggccgggcgcggtggctcatgcctgtaatcccagcactttgggctgctgaggcaggtggatcacctgaggccaggagttcgagaccagcctggccaaaatggcaaaaccccatctctactaaaaatacaaagaaattagccgggtgtggtgctgggcgcctgtaatcccagctacttggggggctgaggcaggagtaagctgagattgcgccactacactccagcctgggtgacaaagcaagactccatctcaaaaaaaaaaaaagttaataaactacttaattgtgcatctcctgtgtgccagccctactctatgctttggggatggaatgttggaggatcccaccttggggagctgtgtgtgagctccccacacagctcagatgggggtatggggtctgtatgtgagccagaacaaaatgcagctaagtgacatttagcatgtgttagttccacagagaaaaatgaggcatggggggtggaggtgggagaggtgtgaatgggggtgagagaagtctctgaggaaatgtcattcgagcggaatcactctgagcttggcaaggttaccctgtcttactgacgggaaacctagaccagagaggccaggaagcccgcccaggatcacacagcacagaggtggccaagcagggactggaatgcagggcagcctgggtgcacagagggcactgtagcagcagcaaagggagaggagaggagtaggtagatttcagtactctcagaatgcggatgggatcaacgaggaggaagtagatgacggaggctggaaagtcacttcctgctaagtggccagtgtcagtgttccaggcagagctgcttgggaggtggtttctggaaggctccaagtactcctgctgctgtgtcccagaaaacccttagggccaggcccctgctcaccaagctcctaggagacttctggggggctcatttcggaggcagtccaggccgagggtgaatgttggtgccctttgcatgcagcagtctgggaacttttagaagcaaaatcggataagtcccagggctcctggcgctctcagcctggcatgcgaggccctctgcgcctgccctgccctgtcctcaaactctcccctgagagctgcgtctccgtcgcccaggctgtgccctcctgtgcccgacttagaactgttcggaataacactcaaaattttaaggaaattaaacactcgaacaaaggatttttagcaaagcaattttacttctgtacagaggggtgcttgtccttggccagtcgccatgagagcacacctgaacaaagggacacgagagcctttattcctgatgcaagtcctgctcctgtaccctctccccattggccggggtcgggtcatacaatctaaaccaattttggttggctaaacatttgaatttttgtagataaggtgggcacgtaaaagagagaggaaaggggaagggatgtctgtagtgaactagaaagttagtcttctttgtaaataagggaaggaatgtgagctggtactggtaacgcctggtactgtggcgtgcctgggcatctaacaaagccagaaaggaaaaaggaaaaaagagtgtgtatgtgtgtgtggggtactatgaattaaaagattgatcagcctgtttgaagagaaacctcatcatattccacactacaaataccccaggcccagaaagtcaccttctcctgcctgtgcccacagctctgtgttctcttgggcgtcactcccgccctatgttctgaagctgtgattgtccgttgtctgagctgggcgctggtggcgtctggggcatcaccattgtcctcacagtgcctggcgcctcagacacaaagtggagtcacaggacagcacaggccacaggcaaacaccagaggtccaaagccgggccctggctgggagttactggagggtctgcctaagatgtgtttgctcagaaggccaggtgccctggtggttagacagctcaggccctgtgccttcagtccatgttcatgccacccccagatgctgtgtgaccctgggcaggcccccaccctctgggcctcatttgcatctgtaaaatggagccagcagacccattttaatggatcctgtcatggttaaatgggttaataggcaggtgcagtggggtcattgcagggagttcaagaccagcctggacaccatagtgagaccttgcctctacaagaaacttaaggtggcctggtgtggtggctcacgcctgtaatcccagcactttggactccattgcactccagcctgggtgacacagtgagactctgtctgttaaagaaacaaacaaacaaaaaaaccaaaaaacttaaggtggtggtgggtacctgtgatcccagctacttgggaggctgagacgggaggatcacttgagccctacagttggaggttgtagtgagctgtgaccttaccactgcactccagccagggcagcagagtgagaccctgtctctatttaaaaagaaatcaaaaaggttaataatcatgaaaagttctcaatgccttgcttggcatagagtcagtgttgaatagctattagctactctaatgttttgaactcagtaatgcgtgtgtatgatgcggaattcaaagatgtcggaaaacatgcagtggctccttccccaccaggccccagccgccccgggtcctgttttgtttccctttggttgtcttagtcacaaagtacagactttcttctgtaccttttccttccccttcccccctcccccttcccttcccccccccacttccctttccccttcccccttccctttcccttttccttctcttcttcctttccttttctttcttcagtaaaactgatcactacaaaccttttctttttttctcacttagtacaccaaaaagggagttacatgtctagaaaggacaggctctttttgtgtgtctgttgctgcatagcagcatggataggccataatttatatataaatacacgtattttattctattttaaaggtttttgttttgtttttttcccccgagacggagtttcgctctttgttgtgcaagctggtgcaatggcgcgatctcagctcattccaacctctgcctcctgggttcaagcgattctcctgtctcagcctcctgagtagctggcattaaaggcacccaccaccacgcctggctaatttttgtaattttagtagagatggggttgcaccatgttggccaagcaggtctcgaactcctgacctcaaacgatccacccacctcggcctctgaaagtgtttggattacaggcgtgagccattatgcccagcaatatatcttatatataaggtgattgaaaatatatgttttcaaaaagaaaacatattttcagtcagcttccttaggttgaacgtaatttatatttaactagtcccctgttgctgggctttaaaattctttgagatctgaatttttcgtcttattgagaaactaacagggttgtaacaattctgtgggcaaattttaatggaatgtccaccctgtacttttgtatctgaatcttcacgaacatgttctccttgacttgtgaccttttcctgagatttcagttagatatagttaatcgcttaagtctttttttttttttttgagacggagtctcactctgttgccaggctggagtgcagtggcgctatctcagctcactgcagcctccgcctcccaggttcaagcgattctgcctcagcctcctgagtagctgggactacaggcaccctccacctcgcctggctaattttttgtattttagtagagacggggttttaccgtgttggccaggatggtcttgatctgctgacctcataatctgcccgcctcagcctcccaaagtgctgggattataggcgtgacccactacaactggccaatcgcataaatcttaaacatataccttgattttcttgtcttcttcttcttcttttttggagacagtctccctctgttgcccaggctggagtgcaacggcgcaatcatggctcactgcagcctcagtctcctgggctcaagtaatcctcctgccacagcctcccgagtagctgacactacaggggaatgccaccatccgcagtgaattactttttactttttgtagagacaggggctcgttatgttgcccaggctggtctcgaactcctgacttcaagtgatccacccaccttggcctcccaaagtgctgggattacaggtgtgagccactgctgcaagttttgattttctaataaatgattgtaccttggtacctactggctagatcaagatgcaggacttcttcatggtctcagaaagtccctcctgccccttctagtccatttcccgaaagggaaccactgccctgatttctatctccagagactagctttgccggttcaagttcaagtccaccctgtgactcagcaagagaaacaaggacatgtgtctacaaaaagcgcatatgagaatgttcagaacagctttatttgtaataaattcaagctaggaagaccccaaatgtccatccaatggtgactagacgaacagactgtagtccatcagtgcaatggacagattcgaccacgaaaaggaatgaacgtcagacacacgaagcagacaggatgtctgtgattgcatcacatgctgctcctgtgttgttttatcgttgacatcttccacttgcacacttcaaaaatagtcattgaaaggatggagcaggggcactgttgtgaggggcacgtgctgtcaccgccgctgctggtgattcagtgtctagccagcgccgcatggtttctgagatgctgcatttgtcttttttttttttttgagacagagtcgttctgtcacccaggctggagtgcagtggcgcgatctcagctcactgcaacctctgccttccaagttcaagcggttctcctgcctcagcctcccaagtggttgcgattacaggtgtccaccaccacacccggccagggtttttttttgtctttttttttttgtattttgtattgtttttgtttttgttttgagatggagtctcactctgtcacccaggctggagtgcagtgatgcgatctcggctcactacaatctccgcctcccgggttcaagccattctcgtgtcttagcctcccgagtggctgggattacatgcttgcgcccccacacccggttaatttttgtatcttaagtaaaggcggggtttcaccatgttggccaggctggtctcaaactcctgacctcaggtgacccacccaccttggcttcccaaagtgctgggattataggcgtgagccactgtgcctgacctgagacactgcgtctctgatgtgcaagatgccaagtgtccctgcccctcaggtccctacctgtgagctaggtggcctggggctctggtagggccagggccaaggctacttgtggcgttcatgaggttaataccctgggacagcctggtgtccactgtgactactgtgacggaaagacaaggggccatgctaagaggtgactttggggtctgtcacctgcatgggggcgcccgctcgctgtttccctcgttcagttcactccgcctcccaattgatgtagcttgttccctcagtccccctgctcagagaaccctctccaattatcccagcccccaacccctctcacccctgcagtatgtcttcctcgcacccacccccgtcagaatgttggcgccagtgtcaccagcacctccccaagtgctcaggagccagtgagaaaggttcgctccttttcatgcaagccatgagctgtgatgttgtccaagtctcgtatcctgtttgtgcctcaggctcctcatcagccgaatgggaggctgacggaaagggattagagctcaggcatcagcttgaactggggcacgtggcgtgacaggcctagtgcctggcaggcaggtccctcgggctctttgtcatcctcaggagtgtggctcgaagacaggtagcatcccaggcctggagagctgactgtgctgcctgtggctgcagagacaggatgcagaggccagggctcgtcccccagagccttgcaagtgtctgtagggcgctcccctctgtcttgcctcctcccactctctggctcttctctatccggcctgccctcaggttgtgaccatccacctcccaaactgccctggaatctgcctacggcctgtccactggcctccgtacccctgcctgccatctctctggtttcgcccctgatgtcactcacatgaaccacagcggtcacccccacctgcctcctgctcctgccctctcctctgccctgcatcagccagaggggggtttaaaagcttacatttgttaataatctggctaaagcttaacatttattgtaatccatccctaaatcccagctggtggcattgctctaacagtgatgaccagcctcctcatcataatccccagcactgccaccctcaaccccccagcgctgaccactggaggctgcttctaaaacttcagccctgctctgccagcagcgcccctggggggtcttcgtagccctgttgcccatcacgatcccttttctcatgcagtccaggctgcaagcccccgccgagggcttgggctgacttgttgtgtagtcagtgctgtgtctctgcacccagccagaagtggtgggacagccccccggctgacgggctagaacccatcatccagggtgtgtggaaagagcacatctcccccccgacgccagccactgggtaatacattcccaggaatttccagtgcccagccccagctgagaaacaggtcttctggaaccctccagcaccctcatcaggggttcccagcatgggtagggccacctgccagctgggaatgattgtagtgctagtgacactcactcagggacccaggatgctgtctcgttctgtacagggcacagctgtacagtaccaattgccctgtgtcctgtacaaattttcaacgatccaaacatctaggtgcaaaacctgtttgaaattctctgtgttggccaggcacggtggctcacacctgtaaacccagcactttgggaggccaaggcgggcagatcacctgaggttgagttcgagaccactctggccaacatagtgaaaccctgtctctactaaaaatacaaaaaaattagccaggcatggtagcgcgtgcatgtaatcccagctactcaggaggctgaggcaggagaatcgcttgaacccgaggcagaggttgcagtgagttgagatcgagccactgcactccagcctgggcaacaagagcgaagctctgtctcaaaaaaaaaaaaaaaaaaaaaagaaaaagaaattccctgtgcctagaacctttcaccattttgtatgaaacaacagaatttcctttcgagcctttaatgtaccccgagcccactgtttctacttcagtcctcactggaaagctttcattttcctttctgagtgtacagggtgacttcctgtcttcctccttgctggaatcctggtgtattcactgtaagtcggagcaggctactccctctatcttctggggtggttgtgcctgagtcttttccattgtgaaagacatggaattgattcctttcttccttccctccttccttccctccttccttccctccctccttccttccctccctccttccctccctccttccttccctccctccttccttccctccttccttccctccctccttccttccctccctccttccctccctccttccttccctccttccttccctccttccttccctccctccttccctccctccctccttccttccctccctccttccttccctccctccttccttccctccctccttccttccttcctccctttcctccctttcctcccttccctcccctccctcccttccctcccttcccttctttccttgatggagtcttgctctgtcgcccaggctggagtgcagtggcacgatctcagctcactgcaacctccgcctcctgggttcaagcgattctcctgcctcagcctcctgagtagctgggattacaggcgtgtgccaccacacttggataatttttgtatttttagtagagacggggtttcgccatgttggccaggctggtctcaaactcctgacctcaagtgatccgcccacctcggcctccccaaagtgctgaggttacaggcctgtgccactgcacccggccaggatatgtacttttcttaaacagctctgtcgaatagtaatttacattccgcgaaatcgatccatttcagaattagtggtctttagtcattttacagtccttttttttttcccacacagagtctcgctctattgcctaagctggagtgcagtagtgcagtcatggctctgtacaacctcagcctcccgggctcatgccatcctcctctctcagcctctctagtagctgggatcacaggcgtgggccaccacgcccagctaattttagtttagtttagtttagtttagtttttgtagagatggggtcttactatcttgtccaggcttttacagttaattttagtaaacatcaccatagtccagatgtagaacattttcatcaccccagaaagctccttcccctccattggcagtcacccccgttcccacatccaggtatccactgatctgccttctgcttctgtagatgtgacttttctggacatgaaacacatcctattttgtcatcaataactttcctcgtattttacccatatacatgtggcattgtgttgatttaaaacacataggaaatgtgttgatctcctgggtatgggggaaatttaacaaatacatgccagggaatgggccccctgggagtacggggggtggggcacagcctgccagagggaaatggttctggtcactatgaccttccatgcataccttcctgagctcttcaggcctcaggaccctccaagaccagagcattccccagggcccagctggggttggtgcctttgctgaggtcgcccaaattgcaagacagagttgctccaccacatgtggtcacacttcctgcccctcgatccggacgcaagagtaatttctgtccctctccccccctcacagggacttccttccccgcggttcaggaatcgtcacccggcggcctctcattctgcagctcatcttctcaaaaacaggtaaaatggggcggcctgaggttcagcaggaagtggatgtggatgtgtggttgccaggagttgctgggggcggagggtggaacttgggtcctgggctgtcattggacattgaattcacgtgttccacatgtgtgaggaaattgaaaaacggctcagtgaacacttacacacccacactgcaagccctcagctgtgaccagaatgccaggtgccatgtgtgctttcttttttcttttttttgagacagagtctcactctgtcacccaggctggagtacagtgatgctatcttggctcactgcaacctccacctcccaggttccagcgattctcctgcctcagcctcccaagtagctgggattacaggtgtgaccctccatggccagctttttttttttttttgtatttttagtagagacagggtttcaccctgttggccaggctggtcttgaactcctgacctcaagtgaccctctcacttcggcctccctaagtgctgggattacgggcatgagccaccacaccggccccatgtgtgcttttcatgtgttatagataacccgattttgctgaacgctttcaaagtcagtagcagacgtggtgacacatccatccttcacgccccagtgcacctccccatgcaataaagacgcctgtctacaaagtcccagcaccatgccccagagaacgagtcattcccgcatgtcatccacgtcccagtttctactcagcatgtcgccagttgtcccccagatatctggctggttttatagctgctctgctcaatccaatgctatactcttttgtaatctcttcttctcttttcattaaagcagcctccccataatcactttttttattttttttaagagacagggtctcactctgttccccaggccgtgcagtggtgtagtcatagctcactgcggcctcgacctcctgggcccaagcaatcctctccaatcagcctctcgggtagctaggattacaggtgcacacaccaccacacccagctgatttttttttttttttttggtagagatgggggttatgttacccaggcaggtcttgaagtcctggcctcaagcaatcctcctgcgtcagcttcccacagtgctgggattataggcatgaaccatcacaccagccctctaccattgctttttattttttattttatttatttatttattttttgagacaaagtcttgctctgtcgccaggctggaatgcagtggcgtgatctcggctcactgcaacatccgcctcctgggttcaagcgattctccttcctcagcctcctgagttgctgggactacaggtgtgtgtcaccatgtctggctaatttttgtatttttagtagagatgggatttcaccatgttggccaggctggtcttgatctcttgacctcgtgatccgcccacttcggcctcccaaagtgttgggattacaggcgtgagccaccgcgcccggccaccattgctttttaatcagactttgactcttagggagacccagcctgttgaatatagtatggcctatgtgtggattttttcctgttctttccttccctgatctcagtgtatttctattcttcccacccgaggctgacatgaggtgggcgtatatcccagctggaaaccccctcgggcctccttgggaaggatcttgggtcagaagctagacccgggagaggtaagggtctccgtgccccttccctgctaatctgcaacatcagctctgggcgttcaacactcagtttgtgttaatgtcttcttgcggcccttttaaatactctcacactgggaaggcagctgacacacacacccccattctacagatggggaaactgaggcttagccatgctgcctgcctttccaatgggccccagatctgggacctgcatccaggcagatctgacctcaacgccagctctcagcttggcctcccaagactcctcactttcgtcctctggccccgcccaacctggcaagaaggcgtgtctccagtgagagacagcagccgatgggcccaccacctcttctttatgagctctgctatttcgtacgccaccgatgggccaatgggctgccacctctgggttcaggcgtccaatcagctgtgccaggaatgggcagccccaaagtcctgagagtcactatagaaatcagtgttggtagttttctgtttctcattgagcaggatggggacagatgtgcaaactgcatttttattttattttattttgagacggagtctcactctgccacccaagctggagtacagtggcgggtgatcttggctcactgccacctccgccttccaagttcaagcaattctcatgcctcagcctcctgagcatctacaggcatgagctaccacgcccggctaattttttgtgtttttagtagagacagagcttcaccatgttggccaggctggtctggaactcctgagctcaaatgatctgcccgcctctgcctcccaaagtgctgggattacaggcgtgagccactgggcccggccacaaactgcatttttaatgagtccctggtgatgctgccagtctctggccacaccactgggagagcctgccctgcttggtttaggcttggagcggagactgcccaggttcccaacccagctcctagggagggaccaccactgtgtttcctgtctggacagtgatgacaataacaccaccttgttagccttaaagcacacgttatttactacatgtcagggaggaggggagagaagcaggcagagagccttggccaggagggagcacagagcgcaggcctacccagtacctgacccggatgaacgatgatgggttcctgatgtctgtccccaccttacagaggagggagccaaggcttcctgaccacttgccttagggcacatgggaacattgtctttaaagcccacccttaagccacctcttgggggaatgtggccttaggccaaggtgtgacttgaccagatcctgtggctgttggtggaaaagggaccacaggggccagtgctgaggccagtgccctggaggaggcaggagtaggtgctggaaggggtgggggcaggtgggggatgggtgtggcagctgtggtggaggtggatgcatagttgcatcctgttgggctggttgaaaagggagttccagaagtgtcccacatgggtggggccttttcctgcctcccagcttgcacccctcagccccgcctgatcatggcattttcagtctctgtctccttttttgttttgttttgttttgttttgtttgagacaaggttctgctctgtggcccaggctagggtgcagtggcacgatctcggctcactgcaacctccacctcccaggttcaagcaattcttctgcctcagcctcccaaatagctgggactataggcgcacaccacctagcctggctaatttttgtatttttagtagagacggggttttaccatattggccaggctggtcttgaactcctggcctcaagtgatctgcccaccttggcctcccaaagggctgagattgcaggtatgagctaccgcgcctggcaaatttttaaattgagatgaagtcttgctatattgaccaggctggtcttgaactcctgggctcaagcaatcctcccatctcagcttcccaaaatgctgggatgacaggggtgagcccctgcgcccgaccaggctccaatctcttattgctccaagtaggtgcccacttggtgctgggccttagctgatctccagggaggcagcgtgagcacctggcatggtcccagcccccgagcccagcctgtgagtgtctgttggattcaccttggggttgggggcccagagagaacattctaggtagggaaacagcattagcaaagcagtgtggggaggtggtgaggcttgggaggggccagaaggcaggagggactgggactggaaggcatgttgaggattcaggcagtgggagctggggtggcatgcatggtggcgggagaccactggctgccatgttcaggagggacagtcagggaccagaatgcaagcggggagtgggggatagggagtggcagagaggctggcatggcgccaggcaagaggcaatgggggcctggccctggtggtgcgggcagatgccaggcagtctagactgtcttccaggcaaggcattaagcagcataggcacccttgctgggggaggtgggtgggaggtaggacgccttactaagaggagaggaaaatgaacacattgcgggcatcagtgattgctggggccggcggggccttgtggggtatacaccagaccacgtggctcctagggattggcagctggctctctgtgaccaaactcagaaccaggctgccaccctttactggcccgggacttgttaaagtgacttccctctctgtgccttggtagcttcatctgtaaaatgggggtgatggtggcgctgccatcgtggccatggcaccccattggctgtggtatgctgtctcttcctgtggggtctgatgtccaaagacagggcccccagggcgcagcccacgttcccctctggttcccgcagcttgccctcattccagccatccccagtgaaccataacttccagccatagaagtttaaacattacctaagaccataaccaccaggaagtttggtggcccatgagtgaaccctgccctcactgggaagcagccccgtaaactctgagtgcctgggactgttcctgtgtggaatgtgcacagtgaggccctgtgaaccacccctccccaccgcccttggccttgaactggcctttggtgtgctcaccggaaccaaggaagagatgtcaggacctggctccagggcttcccattggcctcagaatcaaatcgagcctccttctcaaggccttgtggcccttgccagtctctgggacctcacctcctcctggtccccagccactgcccccatccatctccctcctgattctcaggcccagcttgctggttcccactgcttggcctctgtgctcactgtgctgcctgcctggaacgccctgttccctacctgccactgtctgctgctcacccgcacctggtcacttgccgccttcgttccccggtccccggcagcacgagttatcctgttcttgttttttctttttcttttttttttttttttgagatggagtctcgctgtcgcccaggctggagtgcagtggcgccatctcagctcactgcaagctccgcctcccgggttcacaccatgctcctgtctcagcctccggcgtagctgggactacaggcgcccgccacctcgcccggctaatttttttgtatgcttagtagagacggggtttcaccgtgttagccaggatggtctcgatctcctgacctcgtgatccgcccacctcggcctcccaaagtgctgggattacaggcgtgagccaccacgcccggcctgttttttcttaatggactctctctgcgccagcacacgagaacaggcatgcagatcggctctgcccagcacagggcctggcgccgagcaggtgctccgcatgcacggccgagtgaacgagctcaaagggctggtgctgtgccccttcttgcctactgggcgggaagtgatgggggttactttaccaagcatcttcccctggtgagcctggtccatcactctgccattccatctgcagccttgtatctagagagcagaccaagctggcgtgcgtcaggctgtgggctggctgggatgcctgcccaggctgacaccttcccagtggcaatttgtcctggactgggagatatttgcgtattgcctcggattagagagaactcaagggctaaatgggcatgggaagtgttgtgtgctgtgcccacttcttggtctgctgaaggctctcaaaagtcctgcatgagtggatcctgcctgctggcgtggtagctagggtctcctgatggtggcagatccccaagttgttccccctggtcctgcctgccaacagcaggtttgggaaaggcagatctcctctccttgccttcagggccagcctcgtcattgtgttctttgctgggggaacggtgagaagatccagggcagagccccagtgtgcaaagcactgggaccctagcccagcccctgagggttccctgagactaacagctgagccgtgtttgtgctcctgatgggatttgatcgcagtcatatgggagccccggcactgggttctgtgtcattgcattttggggaaactgaggtgctgagagaagggtaggaacccggagctgggtgtcgctaggctgtgaaaccacgaggcaccccgaaaactctcctccctctctccctctcctcacctccccaaaccctgctgtcttttctgttgggctgaaggcaggtcttcccagcaggacctgggcatttcaaaattcttaagtagtgccagcgggcacgtgaccagtgtgctttgaagatagggagggccattctctgaccaagggccttcggtcactctggggctccacaagctcctttgaaacaggaggctccgaagacctccagggtctccaggccagaggtgactgtggcctctggcaaggggctgcttcttcatgtcccaggccccctgaccctgagaaggtggcagcttgcacctgtggctcccttctggggacacctcaaagggcctgaggtgcaggggattgactgtttagcacagtggggccccagttgggggttcctgggagtgatgtcctcctaggttagagcacagattcttttttcatggattttaattaagcagctgctgtatacgagatgctagggggaactgtgatcacaccaagtctctgctctctcagagctccagcttcagtaggggacacaggcttgggagggaggcagaacctctctctggaaaaacccgcaagtacaaccagtgggcccacagttaggaggccctgtggtgggcgaggacggctgactccctggccttggcagcgtgattgctggatgactgcccagattaatcctttactcctgctgtgtgccaggctgggtccctcagagtccccagggcctgatcacatgccagctgcgaacctctctgagggggcccgggctgaccctcctcccagggagccctcctggctcagggtgccgggtgacagtgggggtgtgtgtggagctatcaaaatgctttgcagtttgccgaggaattacaggaactggctttggtatctggaaatgcctgtctgcagagggtggctgtggggtgcagcttgatggcagggaccgggacaggcagagccaggggtggctcagtggcttgttggctgggcctcggctgctgctgctgtggacaagttgacagggaactcagtgttaaggcctctggctgattctttgggccagtggattgttaaaaaaaaaaaaaaaatcatctcatctccagcacttgagcgcatgcagcgttccagaggcccaggctaggccctccactctatttctctttttgtcattgttttgagacagggtctctggcctccccttgtcatccaggctggagtgcagtggcgtgatcacagctcactgcagcttcaacctcccaggctcaagcagtcctcccacctcagccacccgtgtagctggaactacaggcttgcgccaccacgcccagctaatttttaatttttttgtacatgtaggatcttgctatgttgcccaggctggcctccaatgattctcccacttcagcctcccaaagtgctggagttacaggcatgggccactgctctcggcctggtggaagcttttaaacctctattgggctgggcatgatggctcatgcctgtaatcccagcactttgggaggccgaggtgggcggatcacctgaggtctggagttcgagaccagcctggctaacatggtgaaacctcatctttactaaaaatatacaaattagccaggcgtggtggcatgcgcctataatcccagttacttgggaggccgaagtatgagaatagcttgaaccggggaggcagaggttgcagtgagccgagatttcactactgcactccagcctgggtgacagagcaagactcagtctcaaaacaaacaaacaaaaaacctctgttgacctggcattcagcatttactttcaccatgccagggagccctgtgaagaaaggcaggcagctgcggcagacctggtcggtgcctgggcctttttctctggtgtggttctgttgctcactgacccactagggaagaaacggttttctggcacctgctgtccatatccttcgcccacatggaggggttggccgacagcagaaggatcttggaggagagatcacaaagaacagcccctgctggccgggcgcggtggctcacacctgtaatcccagcactttgggaggccgaggcgggtagatcacgaggtcaggagatcgcgatcatcctggctaacacggtgaaaccatgtctccactaaaaatacaaaaaaattagctgggcgtggtggcgggcgcctgtcgtcccagctacttaggaggctaaggtaggagaatggcatgaacccaggaggcagagtttgcagtgagccgagattgcactactacactccagcctgggtgacagagcgagacttcgtctcaaaaaaaacaacaacaacaaaaaaaaacagcccctgtcttctctgatcccctgttggttcccagcctgcatgtgacaaccggggaaggtgccgtgctccaaagtctggcatgtgagtctggctgcctggttccagccccatctcgtgtctgcccctgactgggcggacttgggtggggcaggtggtccttcctgggcccgtttcctggtccttgcgttggggaatggcctgaggttccgggggaaccttttgcagctcagacacctagattcagcttgctggggaagcctgtggcagccgggcaggcagaacctccatttctcacctaacatgcgtgagtgtgcccttggggacacagcaatgaccaaggcagatgggcgtcccttccctggtggcatggacattcaaggtaaagctctctatattagatttcttctcaccctttgtcagatggtagtaagtgttatggggaaacgaaggcaggggaggagggggctgggtggagcagctgctgtggggagagagatctgcaggaggtggggatgctgtgtgacttgagagagtagcttgccctctctgggctcctgcctgtgtgtgctgggggaacgatggcgcccactgcccctggtgctgtctttgccacatcattccttggggacttctgcccaccagctgctcagaccgtagctgtgctggctatgctcttcctgtgcaggtattgactctgagtcctcatacagcctgttatgatgcgcattttacagatcagtagactgagacctgggcaggccctctgactacagactgagctcattactgcacacagcgtgctgccagtacatgctgggctctggggtgctggagccgcaggtcctggccccatcaatacaatccaaagtgagctggctctgatgaggaagaggccaagatgccccactcagggaagtcttcctgggagaggtggtagccaggcagacctgggagtaggaggaggtagggctgggctttgtagacaccacacttggtgggacagaggcctgctagggagagggcctgtgtccttgccaccagcccatcttccacgccatgtccccctgcactctttgaagggagatggtctcttttggggctaagctggggtcctggagccagaagagaactgagatttgctgtggggggttgggagctgttccatttttagtggctgctacaggaagagcggccgagtgtttccccttgtccctgcagaaggctggagtgtaactgtccttgggaactgggtcagctgatagcagggctgggggtgggggtggggatcctgaatcctccagcagatgtcctcattgccctgatctgggtggccagtgcctgtgctggacacggtcctcagtcatcggagcccactgagtctccccctgaccctgcagagaatttcaaagaggcgaagttccttccagtggcctcacaaaggctatctggcttaggagccattacctgaagccagaatttctgagttccaagtcccagctccatcacggaacttggcccaaggcccttaacccctctgggcctcagttttgtcatctttgaaatggggatcttagagatgcctacctgtcaagggacttgtgaggcgcaacgggaccacacgcagggcctggccagagtgccgtagtttcttcggttgccatgatgggacggtgaaactcctcacactcttctttctgccttgaagattctagacctggctgggtgttcatctccctttttgcctttgcttgaggcagtttatggcatggctgtgttattcacgtcgccaggtctcctcctggtggacgttgaggccattttcatttttttactcttaaaaacgacagggcagtgcgcatcttcgcatctccggggtgggtcaggtctctgacctctttgccagtgtgacttattacccctttctttctttgtttttctttttgagacagtgtcttgctctgtcgccaggctggaatgcagtggtgtgatcatagatcatagctcactgcaacctccagctcctggctcaaatgatcctcccacttcagccgatattaatccattttcatgctgctgataaagacgtatttgagaccgggcaatttacaaaagaaagaggtttaatggagttacagttccacacagctgggctggggaagccccacaatcatggcagaaggcaaggaggagcaagtcacatcttatacggatggcagctggcaaagagagtgagagagcttctgcagggaaactcctgtttttaaaaccatcagatctcgtgagacttattctctatcacgagaatagcacgggaaagacccacccccatgattcattgatctcccactgggtccctgctacaacacaagggaattatgggagctacaagatgagatttgggtggggacacagagccagaccatatcagcctcccaagtagctggaactacaggtgtgcgccaacatgcctggctaattttttaaatttctgtagagacggggtctcactgtgtcacccaggccggtcttgaactcctgggctcaagtgatccaccctcctcggcgtcccacagtgctggataataggcgtgagccactgtgcccagccatttcccccttatttttagcatcactacagtagctgtgatctctgagctttggggatatcccctccccaacattttactctgaaaattcgaacatctggaaacgtcaaggctttgtacagtggacacctgtgtactcggcagccaccttccgtgatgaacatgccttatatttgctttgtcctcaatctgtgattcgggactggatttctcttgtttcctggtgggacccacactgcttgtcaattacttattttgttccccttcatcccagtcttgctgtgactttcagatacccccgggtcttatatacactcagggttatacccagaaaacatttctcctgggggatttgtctctaggtagggggccctcttgaatagtcagggggagaaagaaagactcaagaccagctctgaggaggcggcaggggtgccccttccctctaccttgtgggctccttggggaagaaggacaagtgagtgccatgagaaatacccctggggattttgtggagctggaatgtgctggtggaccatgaatccacaaggacttgggcatcgaactcccttgactgggacccacagcaagggaggctctgcagcatcaccttaatcaaatggactcaccctctctgggtgatgtatcctggtgcttcctcttctgttcatcagtcaatcaacaaataaatggctgggcgtggaggcatatgcctgtaatcccagaaactttggtcattggttatgtctacctgtttatttttgggggagggggattcataatatgtcatgacgtatattaacagtttgcaaagtgccacatgggaacgtaatcttcaggatctggaaagaggctcagtctattcagtctataggaacccccgcctcccccaagacccttgtcatgagaacgaatctttcactcccaaattcctagagtgacgatgattgggtcattattttcttttttattttattttattttattttatttatttttttatttttttgagatggagtcttctctgtctcccaggctagagtgcagtggcgcaatctcggctcactacaacctccgcctcccgggttcaagcaattatcctgcctcagcctcctgagtagctgagactacaggcatgtgccaccatgccaggctaattttttgtatttttagtagagacagggtttcaccatgttagtgaggatggtctgaatctcctgaccttgtgatctgcccacctctgcctcccaaagtgctgggattacaggcgtgagctactgtgcccagcctgggtcattactttcattcaacaaagcatttctccccgcagtccatgcgcaccctgcccacagctctttctcattttcagcatctctcttccctttctagaacatgccgagtttttgcactgcaagtccaaaaagtttacagactttgatgaagtccggcaggagattgaagcagagaccgacagggtcacggggaccaacaaaggcatctccccagtgcccatcaaccttcgagtctactcgccacacggtaggcagcacgggtggggacccatcactgaccgtttctggtcgttcatggacagtgctatgggtgagcctgtgtacttccactcatgggtatcatgtgcccattcacaaacagttgatattcacacacacatagccccttgatctgtatcttcccacttgtgctaggtatgtagtacccagacctctgtctcagcttgaagaaagagcatgccaagaagttgtttggagtggtgggggattgcagccatttcccccttttaccaagggcagccaccacttggctcaaggcagccagatctgctggtgcctcaagagaggccagaaccagtcttctgtaaaatatcctgggttttttttttttttttttgagacagagtcttgctctgttgcccagtctggggttcagtggtgtgatctctgctcgctgcaacctccacctcccaggttcaagcaattattgtgcctcagccgcccaagtagctgggattacaggcatgcaccactacacccagctaatttttttttttttttttttgagatggagtctcgctctgtcgcccagactggagtacagtggtgtgatctcagctcactgcagtctccgcctcccaggttcaagctattctcctgcctcagcctcccaagtagctaggactagaggcaactgccgccacgcctggcaaattttttgtatttttagtagagatgggatttcaccatattggccaggcttgtctcaaactcccgaccttgtgatctgcccactttggcctcccaaaatgctgggattacagacgtgagccgccgcgcccggccaaatttttttttttttttttgagacagagtctcgctctgttgcccaggctggagtgtagtggcgcaatctccactcaatgcaaccttcacctcccgggttcaagcaattctctggcctcagcctcccgagtagctgggattacaggtgtgtaccaccctgcctggctaattttttttttattttttattttttttatttttagtagagacggggtttcaccatgttgcacaggctggtctcgaactcctgagctcaggcaatccacccacctcagactcccaaagtgctaggattacaggcgtgagccaccacgcccagcccattcagctacttttttgtatttttagtagagatggggtttcaccatgttggccaggctggtctcgaactcctaacctcaggtgatcgcctgcatccccctcccaaagtgctgggattacaggttttagccaccttgcccagccaaatatcctgattttaaaactctgcattcaaacagcagcccggggccatagacatcctctggcccagaggcacagattgctaccatgatgggttccttgcgataagttttaaatttgtttttcaataaatgacacctgcatgtggctcagaattcaaaaattacagaaaggtatatcgcaaaaacctaccttgtcaaccagttttgcacacatattttaggttcttcagatgacaatgcaaacatgagctgggtgtggtttcacacacctgtcattcaagctgcctgaaaggctgagtcaggagggtcacttgggcccaggaagtcgaggttgcagtgagctatgatcacatctgtgaatagctactgcacttcacctgggtaacatagcaagaccctctatcttaaaaaaaatgtgtaagcaaaaaacatgtaagcaattgtgattgtatctatgtatatgttgtgtatgtgtttatcactccttttccttaaattgttagcataacataaaaatcacttatgctttttttgagatggagtttcactcttattgcccaggctggagtgcaatggtgcaatcttggcttaccgcaacctccacctcccgggttcaagtgattctcctgcctcagccccctgagtagctgggattacaggcatgcgccacctcacccggctaattttgtatttttagtagagacggggtttgtccgtgttggtcaggctggtctcgaactcccgacctcaggtgatcgcctgccttggcctcccaaagtgctggcattacaggtgtgagccactgcgttggcctatgctttttttttttttttgtatgcctctcagaatgtttctttattatatatttatttttttttttttttgagacagggtttaacactgttggccaagctggagtacagtggtgagatcttggctcacttcttctcctgggctcaggcgatcctcccgccttagtctcctgagtagttaggacaacagatgcacaccatcatgccaggctaattttttatatttttggtagaggtagggtttcgccatcttgcccaggctggtttcgaactcctgagctcaagtgatctacccatcatggcctcccaaagtgctgggatgacaggcatgagtcaccgcgcctggcctcatccatttgtcttttgtttttgtttttttgagacagtcttgctctgtcgcccaggctggagtgcagtggtatgatctcagctcactgcaacctccaccttctgggttcaagtgtttctcatgcctcagcctccagagtagctgggagtacaagtgtgtgctaccacgcccagctaatttttgtatacttagtacagatggggttttgccatgttggctaggctggtctagaactcctggcctcaagtgatccacccacctcggcctcccaaagtgctgggattgcagatgtgagccaccgcacccagcctcatctgtttgtctgtaatggttctttggtattggctgaatggatgggctgaaatttattcagtcatttaggtctattccagtctgaactgtcctgatttagaactgtgccattgaaatggagtaggtagaaggtatctgtaggatgggatcctagaaggggagttactggatcaaaggtgtggttcaggcagagtgtcaggcgacatcctcaagtctgagccccgcgcaggaactttggtagtcagctgggtggctgcgggcctgtttgtgcctcccctctcctggctctgaatgcctttccttctggtttccctcccagtgttgaacttgaccctcatcgacctcccgggtatcaccaaggtgcctgtgggcgaccagcctccagacatcgagtaccagatcaaggacatgatcctgcagttcatcagccgggagagcagcctcattctggctgtcacgcccgccaacatggacctggccaactccgacgccctcaagctggccaaggaagtcgatccccaaggtaaccctgagcctagggcagtcccctcttccaggtgcctctgagcatgggatgtgcccagcatccttggttccaagtcactggcgttctctttaatccatggccgctgtaggaaaaggcctcctggaacatggcacttcctccgagaaccagcagtgctggtgggcatcccctgggaagtcactgtgtggcagttggacggtcctccttggacatggcagtgcccatgttgccagagtgggaagctagcctagggctgaaggaagggcccagcgctccatcgcccagatgcgatcttaggtcccatctagctgttactctgctccctgagacatggtcccctcttagtcagaacgggaacttcagtcctaacccagatagctgatgtgaggactgttgaacttttgggttgtttctgatctttgcatggtgagatcgtctatttcccttcgagttgacacccctgggcccctctagtcagatccttctactgaaccctcactgcagaatgtgagcaggaaggggccccagggagggcacagctgtggcccccttgatgcccaaattggcacccaccagagatcttcactctggcttccatctgtccccagtgtctcatgcacatgccacacatataacacacacggttagcacagagccaggccctcagcccccgtgggagcagttgatctgcagaggtgagactttgctagaaagacatccttgactctggaatgacttgtggagaggtggaattggatgggatggtttccagagtggaattttagccattcaggcaagaggtagtcctggaaacagtcgtgtcaaactcaaatgttcccttgggactttgccggcacttggaaagtccagcatcaaaatctggcccaggaatcatgtttacgtgaggtttcccaaagcctgcagcagcagaggttgtccttaataacacaaatgacaataacggccagcatttgttgagtatttgccgtgtgccaggctcacccttatgaccaccctgtgagatcagggctgtgaccatcttcattcgacatgtcggaaactggggtccaggcctgtgacgttctggctttcccaggtgatgtgacctggaagtttcagggccaactggaccccaggtggcttgcagctgccagctgatgctctttcctggtggcagcctctgacctctgacctctgggctctttcaggcctacggaccatcggtgtcatcaccaagcttgacctgatggacgagggcaccgacgccagggacgtcttggagaacaagttgctcccgttgagaagaggtgtggctttgggggtgctggggaagcaggaggatgggtggggtccttatcattactgaaaccccagcacctgttccctgcctgcctggaagtcattgcttctccatttcaccgtaactccttctttcttttccctttgagctatgtatctttttcttctgatttgtatgcattcgtttttcaagtgcacaattaacacctgctggtttctgaaacattagaaaacaagtgtatagaaagaggaaactaaactcacccgcagccacacttcccccagacagccactggtgaatctgcagctcccagctccccagggtttataactttaattaatttttttattactttctattatgagccttcccttcccttttccttttcctttttgttttttgagacggagtttttgctcttgtcacccaagctatagtacagtggcacaatctcagctcactgcaacctccgcctcccaggttcaactgattctcctgccccagcttcctgagtagctgggattacaagtgggcaccaccacgcccagctagtttttgtatttttactagagacggggtttcactgtgttggccaagctggtctcaaactcctgacttcaggtgatccacttgccttggcctcccaaagtgctgggattacagccatgagccaccgcacccggcctattatgagcattttcaaacattcccaaaagtgtggaaaaaagttcaaagaatcctcgtggatggcttccccagcttcggtggttattattattattttcttcctggaatattttattttttcattttatttatttatttatttatttatttatttatttatgagacggagtctctgttgcccaggctggagtgcaatggtgcagtctgggctcactgcaacctccacctcccaggttcatgccattctcctgcctcagcctcccgagtagctgggattacaggtgccagccaccacgcgtggctaatttttgtatttttaattgagacagggtttcaccatgttggccaggctggtctcgaactgctgacctcgtgatccacccgcctcggcctcccaaagtgctgggattacaggtgtgagccaccgcacccggccatcttcctggaagattttaacacaaatcctaggcactggctgggcgaggtggctcacgcctgtaatctcagtgctttgggaggctgaggcaggaggatgccttgaggctgggagttcaagactagcctgggcaacatatcaagtccctgtctctactaaagattaaaaagttagctgggcatggtggcatacacctatagtcccacctacttaagaggctgaggtgggaagattgcttgagcccaggagttcgaagctgcagtgagctatgatcacactactacactctagcctgcacaacagagcaagatcttgcctctaaaaaaaaaaaaattctataaatcctaggcattgtagcattttacacataaatacccacatttcttttcaaatacttccccttgccatcccatttgtttttttctataccattcatttgtggaagaaaccagaccacatcccacatttgggatttggccaattattgttctctgttagctggtaattagatcaggttcaggttcaagttcaggtacagatcttctgataggagtaacctaagtattttttattttattttaaaaatattttaaatattttgggtcgggcatggtgactcacacctgtaatcccagcactttgggaggccaaggcaggcggatcacaaggtcaggagatcaagaccatccttgctaacacagtgaaatgttgtctgtactaaaaatacaaaaaattagccaggcgtggtggcacacacttgtagtcccagctactcgggaggctgaggcaggagaatcgcttgaacccaggaggtggaggttgcagcgagctgagatggcgccacttcactccagcctgggccacagagcaagggtctgtctcaaaaaaaaaaaaaaagaaaaatttttcaagcattttattttatcggagcagcagttttaggttcatagccaaactgagagggagatacagagatttcctatcagccctatagcccacacatctgtaacctctcccactttcaacgtgcccagcagagcggtgcatttgctagaactgatgagcctgcgttgacccattgtcaccaccccaccccacatccatggttgacatcagggttcactcttgctgttataagtttttttctttctttctttctttctttctttctttttttttttttttttttttttttgacgatgtcttattctgtcacctaggctggagtgcactgggacaatcatagctcactgtagccttaaactcccaggctcaagtgatcctccgagctcagcctcccaagtatttgggattacaggcatgtgcgattgctcctggctaggttttattttgttttgttttatttttttcagacagagtttcattcttgttgcccaggctggagtgcaggggcacaatctcagctgactgcaacctctgcctcctgagtagctgggattacaggcactcgccaccacacacagctgatttttgtgtttttagtagagatggggtttcaccatgttggctaggctggtcttgaactcctgacctcatgtgatccacccgcctcagcctcccaaaatgctgggattaaaggcatgagccaccgtgcccagccttcttttgtgtttttttaaagccattcctcccctctggcatctactctaagctgcgggcacctcctgcctttcccttcatgcttagccgcagtcatttagagcatttcttttactcctgggttttccacctcgatgtctgagatagatgtggggaaaagttcagaccttggttgccagcatcccccagcactgctgagatattgagtggtgaggcgaccccggatcccaggggaatgctgtcagggctaaattcaaaaccctgtttagctgtgaagatccggggctgagaagcaaatctgtggctggctgaggtttggggaggatttgctggtgctagagaggaaagcagaccctacccaaccccacgccctactacagccaccccgacccggctgcccttggacactgttaggcctccatcttggatcctaagggcctttggggtctgtgggcactagccaggctgaggatttggtgatatgggcctcttccccttcctcctgactcactgatgtccacagctgcccttctctgccttccttcctgtttctaagaacgaaggcgcttccactctcagctcacttgtaggcctgctcccgttttgtgacctcaggcttcagaagccctcccactggaccctttttcctggcgtactaatgactcacaactcctcctcctttacgggaacccaggctaggcgtggtggctcatgcctataaccccaggattttggaaagcacagttgggaggatggcttgaggcccagagtttgagaccagcctgagcaacacagcaagaccccatctctctcttaaaaaattatccaggctgggcacagtggctcacgcctgtaatcccagcactttgggagaccaaggcgggtggatcaaaccccagctctactaaaaatagaattagctgggtgtgttggtgcatgcctgtaatcccagctactcgagaggctgagacatgagaatcgcttgaacccaggaggcagaggttgtagtgagctgagattgcaccactgtactccagcctgggtgacagagtgagactctgtctttaaaaaaaaaaaaaaaaaaaaaaatccgtgtgtgatggtgcacgtgcctgtactcccagctactcaggaggctgagtccggaggatggcttgagcccaggagttcaaagctgtagtaagctatgattgtgccactgcaatgcagaatgggcagcagagcgagactccatctcttaattaagtaaatcaagccaaatccaagccagatgctttttactggcccctgctgtttccttctttgtgctgtcacacaggtgatggtgactctggcttcacagggatctaggttcagatcttgggtctcctactgtgacctcaccttggcatgtcttcgtttccctcctccctcttggatccaagagagatctggcgaggatgaagagcagtcacatcccacaagaccctacaggatagatgaccggcacctctcccttgcttctcaagagaaacatgcacaaccccactacaaagaaaagggagcacaggccaggcactgtggctcacgcctgtaattccagcactttgggaggccatggcgggcagatcatgaggtcaggagttcgagaccagcatggccaacatggtgaaaccccgtctctactaaaaaaacaaaaattagccaggcgtggtgacgcacgcctgtaatcccagatgctcaggaggtggaggttgcagtgagctgaggttgcaccactgcacttcagcctgggcagcaagagtgaaactctgtctcaaaacaaaaaaccccacaaaacaaaaacctagccaggagtgcaatggtaggcattccacttggattctttgcaacagtgtgtattgaattatccagcttttctcccccatatactgaagcgttaactttcagttctacctccttctcggtgtagttttggactttcttttcagttccattgatctctctggacatgaataccctgatgtacccaactgtttaaaatatactcgtttgatagtggattttagctcttccctattgctcttgtttttaagatgttatttcttttttttcttgtgagacaaggcctcgctctgttgcccgggctggagtgcagtggggtgattacagcttgctgcaacctcgaactcccaggctcaggtgatcctcccatctcagcctcccaggtagctgggactatacacgtgtgctaccacgcctcgctaatttttgtatatttttgtagagatggggttttgccatgttacccaggctggtctggaactcttgggctcaagcgttccacccgcctcggcctcccaaagtgttggaattacaggcgtgagccaccgcacctggccttgagattttttttctttttctttttctttttctctttctttttattcagagtcttgatctgtcgcccaggctgaagtgtagttgcatgatcttggctcactgcaacctccgcctgccgggttcaagcggttctcctgcctcagcctcccgagtacctgggactatagtcacgcgccaccatgcacggctaattttttgtatttttagtagaggcggggtttcaccatgctggccagggtggcctcgagctccttaccttgtgatctacccacctcagcctcccaaagtgatgggattacaggcgtgagccaccgctcccggccgagatttttttctcacctatctttgaatctcagcttgtagatttcatctgccccaaagcttttttctgtccctgcgcacacaggctggatgtgagctctccttcctccaaatacttaatgttgctcttcgcagctgccatgtgcattcgcaccctctgtgttgtttctgagtaacatgttatgacagctgtgagtgcctcgtgggacaggatccatctctatacttgaatcttgcccatccccgtgccaggtccacttggctcacctagctttgcccctgacctgactgcctctccccacaggctacattggcgtggtgaaccgcagccagaaggatattgagggcaagaaggacatccgtgcagcactggcagctgagaggaagttcttcctctcccacccggcctaccggcacatggccgaccgcatgggcacgccacatctgcagaagacgctgaatcaggtactgcaagggtttgcacgtagtgtgcagtggcataggctgtgcactgcacaacagctgcaatcctcactggcacttgtttcaggctagagcagcacttgttttagcaaaatgggttcagtccacatttagcctaggagtttgagaccagtctgggcaacatatggagaccccatctctaggaaaaatagaaaaaattagctaagcatggtggcacatgcctgtagtcccaggtactcaggaggctgaggcaggaggatcacttgagcctggaaaatcaaggcttcagtgagccatgttcatgccactgcactccagcctgggcaatagagtgagaccctgtttcaaaaacttaaataactaaataaaagaaatgtacttgattcagggtctggtgaagagcagatgttcagtgacttggtgctgctactattacaaccatcactgttattattaccaaaattttaattatcattgtaattattcagtcatttacccagaagactgtatgcattgcctggggttggtgacagggggttaataactcttttttatttattattattattattattattattattattttttatttttggagacacagtctcactctgtcacctaggctagagtgcagtggcatgatcttggctcactgcaacctccacgtcccaggttcgagtgattctcctgcctcagcttcctgagtagctgggattacaggcgtgtgccaccacacctggctaatttttgtatttttagtagagatggagtttcaccatgttggccaggctggtctcaaattctgagctcgagtgatccgcctgtgtcagcctcctgaagtgctgagattacaagcatgagccaccatgcctggcctatcgttctcttcttgtaagtaattgattcacatggtgcataaacagaaatggtattaaaagctatacagtgggccagtgtgtggtagcaggggcaagacgctcctcctcgctgttttctagcaccttccagggtggcagcagggcctcagcagcactccagcagtcatcttttcatgcacatatcagggggacacagtgtccacacgagagtaggttcctgtccttgtagaaggcataattctaatgggggagactgacacccaacaaaccgccagataaatgcacgatcaagaatccagtaggggcgcgggggccgggaaaagagccacccagagaaggcagctcaggagagcaaagagggaagtcagtgtctagagggaggggccctccaggagaggaagctggggtgcttacaaacgggagtagggagaggaagggaagtaaaactccgcagctggctggggcctcctgagagccagcagtgaaaagtccagctggcctccagggagcctggagggggctcagcctccttccacgtggggtgcttcccagagcagcagcgccccttcctctccatttgctcatgacttaagtgccctagtatcctgtcacagaccaagggaaggccagcgtagctccctgcctttctaggcagcccacatagacgggggtcgatggccagggctgcagggcagggacccttggtcacggaggtctttgggttaccccacttgctccatgccatagatgtgaggttccttcatgcctcttttctagctcgccagacactttgtatttattttttatttttttgatgattttttttttttttttttttttgagacagagcctcactctgttgcccgggctggagtgcagtggcatgatctcagctcactccagcctccacctcccaggttcaagtgattctcatgcctcagcctcccaagtagctgggattacaggcgtgcgccaccacactcaactaacttttgtatttttagcagagacagggtttcaccatgttggccaggcttgtctcctaatctcaggtgatctgcccgccttagcctcccaaagtgctgggattacaggcgtgagccactgtacccatcccggccttcccctcaaccccagatggagtctcgctctgttgcccaggctggagtacagtggcacaatctcggctcactgtaagctccgtctcccgggttcacaccattctcctgcctcagcctcccgagtagctgggactataggcacccatcaccacacccggctaattttttttttttttttgtatttttagtagagacggggtttcaccgtgttagctgggatggtcttgatctcttgacctcatgatctgcctgccttggcctcccaaagtgctggaattacagtgtgagccactgcccccggcccatgcccagcctttttgatttttcagacaaggtcttactctgttgtccagaatggattgcagtgacacaaacacggctcattgcatcctcagcctcctgtactcaagcgatccttttgccttagcctcctgagtagctgggactacaggtgtgtgctgccacacctagctaatttttaaaactttttttatcttttgtagagagaaggtctcaccatattgcctgggctggtctcaaacgcctatcctctagtgatctgtctcaacctccccaagtgctaggattacaggcgtgagccactgcacccagctttctctgttgtaggacagatggccaaactctgctttacactttgcaagtataggctgattttatggctttgtttttctttttctttttttttgagacagagtcttgctctgtcacccaggctggagtgccattgtgtgatctcggcccactgcaacctccacctcccgagttctttctcagcctcccaagtagctgagactacaggcacccaccaccacaccgagataatttttgtattttttggtagaaacagggtttcattgtgttggccaggctggtctcgatctcttgatcttaagtgatccttctgcctcagtctcccaaagtgctgggattgcaggtgtgtaccaccatgcctggcccacatttgtctattttgaatcttccttgcttttctctgtagatgcagatgcagccggggagctcatcttgagtgcattctccaccttttcaggggcgatctttccatcttagtttgtagggcctgtccccatgtgtgttcattggcccccgtttccgtggtctggatggactgtccttgcaagctgttgcttgtcctccaaggcgtggataggcccagtgcctgatgtcggccccgtgggctgtttgtagcctcttacactcatgggcagctccgtgccgtctccgttcccagacatgagtgtgtctgtggcttgatttatctgttgctgtctctcaaggctgtgtggtgtggtggccgcatagtggcaccctggtgttggcccttggttggggggagtgtgtctgccactccctggtatcctgcccatgccaccctttctgatctctgacctctctcctgcagcaactgaccaaccacatccgggagtcgctgccggccctacgtagcaaactacagagccagctgctgtccctggagaaggaggtggaggagtacaagaactttcggcccgacgaccccacccgcaaaaccaaagccctgctgcagtatgtaccccggcacccaccaccaccaccaccctggcccctgccttccatcagccacagggccccctaggctgggcaccactcatcactcgtccactcattgattcagcagacacttgctgcaagccttctgcgtgccaggctccatcctaagcatggcattcgccccagtggaggggacaggtgtccgtccctgcccctggagtgctcagaatggggggaagtgggacgaatgggacaaaaaacaagaaagaaaatgtatagtgtgttaaatgtcaaaatatgaaagtggtgctagtgtgggagttgtcgggaacagcctcctttagaaggtgagcattggccggccaggagcggtggttcacgtctgtaatcccagcactttgggaggccaaggtgggtggatcacctgaggtcgggagttcgagaccagcctgatcaacatggtgaaaccccgtctctactgaaattgcaaaattaggctgggcatggtggctcacacctgtaatccccgtacttttgggaggccgaggcgagcggatcatgtcaggagatcgagaccatcctggctaacgtggtgaaaccccatcactaccaaaaaaaaaatacaaaaaactagccaggcgtggtggtgggcgcctgtggtcccagctacttgggaggctgaggcaggagaatggcgtgaacccaggaggtggagctttcagtgagtcgagattgcgcaacttcactccagcctgggcatcagagtgagactctgtttaaaaaaaagaaaaaaggccaggcacggtggctcacgcctgtaatcctagcactttgggaggctgaggtgggtggatcaccaggtcaggagattgagaccacggtgaaaccctgtctctactcaacgtacaaaaaaattagccgggcgcggtggtgggcacctgtagtcccagctacacaggaggctgaggcaggagaatgacatgaacccaggaggcggagcttgcagtgagctgagatcacgccactgcactccagcctgggtgatcgagcaagactgtctcaaaaaaaaaaaaaaaaaaattgcaaaattatccaggcatggtggcacatgcctgtaatcccagctacttgggagactgaggcaagagaattgcttgaacccaggaggttgaggttgcagtgagccgagatcgtgccattgcactccagcctgggtgatagggcaagactccgtctccaaaaaaaaaagatgagtgttggccaggggtggtggcttacgcctgtaatcccaacattttgggaggccgaggcgggaggatcacttgaggtccggagttcaagaccagcctggccaacatggtgaaacccctgtctctactgaaaatacaaaaattagccaggtgtggtggcaggcgcctgtaatcccagctactcgggagactgaggcaagagaatcgcttgaagccaagaggcagaggttgcagtgagctgagaacgtgtcactgcatatcagcctgggcaacagagtaagactccgtctcaaaaaaaaaaaaaaaaaaagaagttgagtgtcaggcgaagacctgaagcaggtgagggcagggcaggagccgtgtgggattaagcccggccagtgcaaaggccctggggcaggactgggccgggcatgtcagaggaagaccctgtggctggatggagtgagtgaggggagtgggaggaggtgatagagcaggttgtgcagggccttgtggggcctcagggaggacattggcttttgctgtgagtgaggtgggagccatggacagttctgagcgcaggagagtcaggactgactcaggtgctcacaggctccctagccgtggtgggagaagagacatgggagagcgggtgggagccagaccttggctaggttaggtccctctccagcttggcctcttaagatccaccccatgacttggttggtgcagctgcttagctgtgagattgggaagcaggtgtgcccccacaatcccaaattctcactcggggactcttctgcctctgaccttttggcttttggcctgtaagggaccttgaggcactggaacagctggaccagagcaggtgacagggacacctgggtagctcatactgcagacagtgccatgcatgaggcacttcccacagggacaccaggaggacaccgcctcctctggccatcacagccctggcatccccccaccccctctgccaggcagtagtgcatggtcgtgggctaaggggccagagtgcttttatgctcagacagccttgactacgttacaaaacactttctacagagcagatagtggccctttgcaggcttcaggaggaaattcatagccggggatggtggtgcacccctgtaattctagctacttgggaggctgaggcaggagaatcgcttgaacccaggaggtggatgttgcagtgagccaagattgtgccactgcactccagcctgggtgacagagcaagactctgtctcaaacaaacaaagaaacaaacaaacaaacaaacaaaacacaagattcagcctactagactgaaggaagtgttgttgtggaggattcagcctaagggtggacctgggcctgctgggtgaccacaggcaggtgattggacctctctgagcctcattttctgcacctctaaagtgagggtcatagcagctgtcatctcacatggccatggggacaaactggcagattacaaggtgcctgtaatcccagcacatggggatgccaagtcaggaggattgcttaaagccaggagtttgagaccagcgtgagcaacaaagtgggatcctgtctctgaaattaagaaaaaaaaaaaaaattaggctggggacgatggttcacgcctgtattcccagcactttgagaggcttcagtggatggatcacttgaggtcaggagttcaagaccaccttcaccaacatggtgaaaccctgtctctatgaaaaaatacaaaaattagccaggtgtggtggtgggcacctgtagtcccagctacttggaaggctaaagcaggacaatcacttgaacctgggagtcagaggttgcagtgagccaggatcacaccactgcactccagcctgggcagacagagcgagactgtatctcaaaaataaataagtaaataaataaataaataaatttaaatactacttgttaagcctatggcaggactgggccaggggatgcccatcacaaacagtccctgtcccccggggcttagcacgttacgtcatttgtaaccagttgccttgcagggccctccctgcccaggcactctcaccatggagaagcgccactgttatctgtgtctcctgtcaagagctgggccttcttgctttagcattttatctgagggtccaaggtcctcatgcagacatgggcggtctttctcggttcacgccttacaagagaacgggaattacggtaatagacttcccccagcctgaattctgcacttggcttttctcttcttgttaaagcaaagcctggagccttctgtctccgcctggtgcagcccacagactgttcatgtatcccagtgcccatggggacacccagggtttttttgtttgtttgtttgtttgtttttggccttaaccgatgcttgtaagttcatctgtgactgtacaggcaaggattcctgcagggcaaagaccccagcagagggatcttgggttaaggaacatacgtgtttaaaattgatttttaatttttcattttattttatttatgtatttggtggttttttttgtttttgttttgagatagagtctcgctctgtcacccaggctgaagcgcagtggcatgatctcagctcactgcaacctcccaggttcaagcgattctcctgtctcagcctcctgagtagctgagattacaggcatgcgccaccacacccagcaaatttttgtatttttagtaaagacaggggtttcaccatgttggccaggctggtgtcgaactcctgaccttaggtgatctgcccacctcggcctcccaaagtgctgggattacaggcatgagccaccatgcccggacctcatgtatttgttttttaaacggggtctcgccttgttgcccaggctagagtgcagtggtgcaatcccggctcaccgcagcctcaccacttgggctcaggtgatcctcccaccacagcctcccgagtagctgggaataatacaggtatgcgccaccatgcctagctaatttttgtatttttgtagagacaaggtctcactatgttacctaggctgatcttaaactcctgacctcaagcaaaccgcctgcctgaactttccaactatgagatcgcagacgtgaaccaccacgcctggccttgtttttttaatttttatttattttattttattcttttgagacaaggtctcttgttctgttgcccaggctggagtgcactggtgcaatcacggctcactgaagcctggacctcctgggctcaagcaattcttctgcctcagccacctgagtagcctgatcctcaggcgtgcaccacagcacctggctaatttttaaagtatttctagagactggatctcactatgttgcccaggctgtctcaaactccttagctcaagcgatcctcctacctcagcttcccgaagtgatgggattacaggagtgcaccaccatgcccagcccaactccccctttttataaggacaccagttatattggctatgagcacaccctgtgatattctcttgactgattacatctgcagtgaccctgtttccaaataagagtacattccgaggtacaggggggcaggattcaacccgaattccgcgggacaccgaccagccggtcacaattgtccagaatgctctgattgtgcagcgtgggttgggcctgtaaatcacctccagggcccccaggaggctggtgcccaggtgtgctttgtcccctgtggctgagagcaggtccccagagtctccatccttgcctaaccctccccctccccccgtcgcccagtctgttgtctgtcattagtttagtgctatgcctttgctgaccttggtcctggtttggtccacaattcaaattctccattccaggctgggtgcagtggctcatgcctgtaatcccagcactttgggaggccaaggcgggcggatcacttgaggtcaggagattgagagaccagcctggccaacatgccgaaaccccatttctcctaaaagcacaaaaattagctgggcatggtggcgggcacctgtattcccagctactggagaggctgaggcaggagaatcacttgaacccggcaggcggaggttgcagtaagctgagattgtcccattgcgctccagcttgggcgacagagtgagactccagctcaaaaaacaaaaaacaaaaaaaacaaattccccattccaggtgaagcattaacctaggcctttgtgtgtctcctggaaggaaattaaatgtgcacaccctttacttcatgtgaggaaagagattttggggatctgggcagcttgtgcttgcctctcccagttggggtatgaaggagacccccctttctttggcagcccagccttggtggccctgacagtggtcaccatttgagcagttcccctttaggagcaagtccccaggtacttcagtagatcatgatttttgggagggaaactgatgaagggagacagcccagtaccctaaggagagcaattaggaatgcttaggaaaactaaaacgtgaacaagatcatcctacttttttactattcacgatgccaataggcaatgctgagagactctttttaagggccaggcccgttctaaggggcgacacatgttattaccactttttgtccattagatgagcaattgtttaccaacaaaaattttctttcttttttttcttctttttttgagacagggtcttactctgtctcgcccaggctggagtgcagtggtgcgatctcggctcactgcagcctccgccacccagattcaagcggttctcctgcctcagcctcccgattaactgggactagaaacgtgcaccaccacacccagctcgtttttgtatttttagtagagacggggtttcgccatgttgtccaggctaatctcaaactcctgggctcaggtgatctgcctacctcagcctcccaaagtgctgggattataggtgtgagccaccgtgtccagtatatatatatattttttaataaaatgtggtctcactgtgttgcccagggtggtctcgaactcccagactaaagccatcctctcacctcagcatcctaaagtgctaatattgcaggcatgagccaccgcacccggccaataaaacattttaacttgtgtgaaaccaggtgtctttgcagaattaccattagtggcagcattttttctttttttgtgggcacacaaaataacagtgcattttaggatcagtgacttcttggaggtaatgagatctaaaaacatcttcagtctccacgaaggaggtagatgttgttaccctcaacccattttgtagatgaggaatcggaggctcagaggggcaaagtcctgtccaaggcctcacatcccatcgatgggtcaggaccaaccccagcaggctgggaggtggcgggaacctatggaagccacctgaattgtggggaagtggctacctttccttcccagcatcctgtaaatcaagttgagcttcagggcagaggtgctgagctttgacccctgaacttcactcctgtcttctgcaaagtgggaggaataagtgggccttctcagatcgaatgggtgaataatcggaacaggcttagcttgagcctgactcgtagccagcatttgccattgggagctcttgaatttggtttatttgtcttaatatagacagaagacattttgctgctgaaaaatggtaaaagaacagtaaaccctggcttgacttggaacatcattccagagtagtgtggaaacctccgttttgatgcttgctttttccttttcctcataggatggtccagcagtttggggtggattttgagaagaggatcgagggctcaggagatcaggtggacactctggagctctccgggggcgcccgaatcaatcgcatcttccacgagcggttcccatttgagctggtgaaggtagtgccccccggggctgggccctcccgtctctggtcaggcaccctcctgctggcctcaagccaggcctcctcccaggcaataaggtctcaagctcctacctctaggcctgaacttgtggtgggcagggtgtggcctggatgaggtgtccccatgggcttccttttctgacactcagctttgaggttttgggcagaacaatatgaaaacccctgtgtttttcctctgacaaaagccaatatacattctttgcaaaatacatagaaaatacagataaatttacatgagaagatgtccctagcatgtcattgaagaaggaaaaaataggcattggagccagcatgtgcaacatagcactgagctgatatatacaacatccttatgtatgaaactgaacatggatgtctgtctacaagtgtttctttgtatttgcaaggatgtttgcaaaaatgtcagccctgggtgctaggatttgggacttctttttccgtgtgtgtgtgtgtgtgtgtgtgtgtgtgtgtgtgatttgcttgaagttttatactgtttacaatgagcacatagcattttttattaaaaaaacaaacagttttttaaaatcagaggagcaagaccaaatgcagtggctcacgcctataatccgtgggaggccaagggggcctgatcacttgagcccaggagttcaagaccagcctgggcaacatggtgaaaccccatctctactaaaaatacaaaaattatccaggtgtggtggcatgtgcctgtagtcctagctacttgggaagctgaggtaggagaatcacttgagcccaggaggcagaggatgcagcaatgagccaagatggcaccaccgcactccagcctcagtgacagagccagaccctatctcaaaaaaaaacaaaaaaaacaaaaagaaagaaaaaagaaaaagctgggtgtggtggtgcatactgatagtctgaaaaatctaagtttacatgaatttatattcccaccaatatgatgagagagttggtgtcatgtcatgctttctgaaactgggttttaattaattaatttgtttgtttatttttattttttttgagacagggtcttgctctttcacccaggctggagtgcagtggtgcaatcacagctcactgcagcttcgaccttcctgggctcggatgatcctcccacctcagcctcccgagtagctgggactataggcgtgcaccagcccacctggccaatttttgtatttttagtagagatggggtctcactatgttgcccaggctggtctcaaactcctgggctcaagccatctgcctgccttggcctcccaaagtgctgagattacaggtgtgagccactgtatctggccagttttcaattttttaaataaaattttgacgagttaaatattctgccttgtgaatatagccacacgtgggagagaacgttccccagatgcacgcctgccacgggggcgccccgggtgcctccatgcatgtgcttggtttgtctcttctcagatggagtttgacgagaaggacttacgacgggagatcagctatgccattaagaacatccatggagtcaggcaagttccacgaggagagtcaccactgttccttcctctccgtggtgcgaccccccagctaattgggtcacccacacctctgagtccctaatcgttaggccttaagagggctcttggatggttttctgtagctgcgagcccctccctgagggtctccaagggcacatgagggtggatgtgtcttagtcctgcgtccattgcaggcttcagggctgtctgcagctcctgatcaaatagggcttagttcctgcccagtcggttggtgtgaacctcatgctaaactaagaatgctcactgcagatttgcctggggaggggcggggcggcactgaatcagggttttgggaagccagcatgagtccccatcatggcttcctcgtgagcctcttgggtcccctccttattctaacaaaggtagttgctccaggtgtctgcccttccatcgccgtggggtcctcgggtcaccctgagggtttccgggcagtggactcaggcatccgaccccacacatgacacaaccttcattccttgttggggacccggccagggccaatgaaattgctgaccatgctttgtttctctctgacttatctcccctgcccccgggtctggacggtttcaggaccgggcttttcaccccggacttggcattcgaggccattgtgaaaaagcaggtcgtcaagctgaaagagccctgtctgaaatgtgtcgacctggttatccaggagctaatcaatacagttaggcagtgtaccagtaaggtattgctccctcggcagggtgactcctgaccttgtggaaacgggggtacgggggtttggtatcaggctcccagcgcctcattggcccccactggtgccttttctccccatatcgctttgtgtccgtgaacttggcctctccccagaggctggggcaggagcatgtaggcctgggcccaggcacacaggggagtgccaggcctcctggactggccagacagatgcacagttgtccctgggaccctgataccaagcctagcatgtgtctgatgaaattggggtttcactgggctgttgctttgctgcctcctgggaagcagagagggaccccccgcgtcaactgctggaggctgagctccttgaagctccctggctgtcaccccttcttgaccaatgcccggcattctcagacttccctggagccaccgacttctctgtccctcagctccgggaatggcctgaatgccagcgacatcatgagagccagctggggtcctaagtgcccctgcccaccccctgcaccccacgctgtcccccaggggcagcccatttttggatccacttagtcacagtgcctctatgcgctctcgacgagccactgcctccactcagcaggacgcgccgggctcccccaacccgcgccaacgccgcgggcctggttcccagggcagcacgctttggccaagcagctgaaatgcctcccagtgggcagtctgtgcttgcgcgaccacagtgtccccagcgctccgggttgccagggaatttctgcttgagcccctctgttcttagtctggaaaagcccacatttgctgcttaagcttcttcgattagaaaagggagggggaaaacagtccaaacaggttggaaaacgctcgtcctagagccaggtgtcatggacatgaatgttagaggactccgcacaccttggctgtctgtctgtgcaatgacaaccccccgtggcccttctgtaactacaccccagaccgagcccacacccccaaaccccagacctctttgatccgaagcagcttccggggcaaatgcgggcgcaggctcccccatgcatggactaatcagatgactctcgtttcttctcttctctctgtctcctgtcctgcgtgtgtggcctgcactgtccctgggtgtctttctgcctcatcctgccctccgcatgacccaggacggggctcttcacccccgacatggcctttgaagccattgtgaaaaaacagattgtaaaactcaaagagccgagtttgaagtgtgttgatctcgtggtctcagagctggccacggtcataaaaaagtgtgccgagaaggtaacaggttttgttctcatctccgcatttgtccccgtcctccccctccatgtgttagtctcaacccgagcatctggaaaattcagcctcggcaggaacccccttccgcctaccagttgtcacttagagatgtcgccaccttgcattggcagatggaatggggggagtggcatcacacgtgggttgtggctgcccgtgggggcggtcagcctttgttgttgccaaacgcattgcatttactaagcagtgccctttcctggaacccctagagaaaggggtttcccagccagcaccaaaacagcaaaacacaggaaacacatcatctgtatagccctgcatgttctcacagtctaggccacctgagagtaaccattccattttccccgactcgtggacttgacccacactgcagaagatgggactcccctgtgcatgaggtctggttaagttggtgctgcagatgaagcctggggaggtgggggcatttggcgagtgtgtgccacagatacagtgatcaggagtggttctctgcaaggagttcctatcgaggctgatggcccagatacccgccttaccattctagaacagacgctactcactcacgctggcgaggcccttcagggttcctgctctcacccagtgctgggcaagaggggggtgccctgaagccctgcatggcaaacatgcccctgcttttctgctttcatgttgcctcctgcctcctgccccccggtcactggctggaaaagcagctctgctctcctgctgtctccggtccacggtgcccccactcttctgctcttagctcccagctggactcactgggggccaggagcaaggtgtgggctcggtgggccccctcatatctcattccccacccccctccgcattttctacctgtgtggttcatgttgcttcccgtgccacgaggaccccgccaatgcgaccactctgcttgttcccccagctcagttcctacccccggttgcgagaggagacagagcgaatcgtcaccacttacatccgggaacgggaggggagaacgaaggaccaggtactggccttttgtcttctttattgggtataatttacatgcagtaaatgtcaagtgtactgttctgtgcatgctgacagctgcatatggcaaagtaacccttacctcaatcaagatacagagcggttccgtcacctcctaaaatccctgtccctatcatgctgacagctgcatatggcaaagtaacccttacctcaatcaagatacagagcggttccgtcacctcctaaaacccctgtccctatcatgctgacagctgcatatggcaaagtaacccttacctcaatcaagatacagagcggttccgtcacctcctaaaatccctgtccctatgcccctttgtagtcaacctctcaaaaacccacaggccaggctgggtgtagtaactcacgcctgtaatcccagcacttagggaggctcaggcaggaggattgcttgagcccaggagttcgagaccaacgtgggcaacatagcaagaccttgtctctacgaaaacataaaaaaattagccaggcgtggtggcgcatgcctgtggtcccagttacttgggagggtgaggtgggaggatcccttgagcccacaagatcaaggcttcagtaagttatggtcgtgccatcgccctccagcctgggagacagagcgagaccccgtctcttaaaaaagaagcagcaaaggaaatccccaggccctggccaccaccagcccgctccctatcctacagtccttcaagtggactcccacaacgtaaggcccattgactcttgactcccttcctgccacccttcttccctccctccctcccctcggcgtctgcatttgggagccaagcgtgttgtttgttgtatctgtagtttgctgccttgattactaagcaatcttccagggaatggatggagcacagcaaggacctccacttgcctgctggagggtgtttggggtgctttttgtgttgtggttttttgtttttttttttttttttgagacagagttttgctctgtcgcccaggctggggtgcagtggcacgatcttgactcactgccacctccacttcccaggttcaagtgattctcatgcctcagcctccgaagtagccaggactacaggcacatgccactttacccacctaatttttgtatttttagtagagagagattttcactatgttggccaggctggtcttgaactcctgacctcaggtgatctgcccgccttggcctcccaaagtgctgggattataggggtgagctaccacgcccagcctgctttttctttttttaacatttaacgctttcttgcaaaggcatgcaagcacacaccccaagttgctgcctacccctcagctgagactgtcacccacgaagcactgggccgtccttatactctcctgcagccgcagcctcagcctcccaagtagctgggactataggcgtgagctaccacgcctggctaatttttgtatttttagtagagatgaggtttcgccatgttggccaggctggtcttgaactccttagctcaaatgatccacccacctcagcctcccaaagtgctgggatgacaggtgtgagccactgctcccagatctgttttgagtcactttctctcagttgtcctctgtgttctttttacaactgtttgttgaaaccagagcttaattaagcccttgcttgctatgtcactttgtttaaaatggtccctctccccttgccattgatggggatgaaatgggctcatttgtcctgcagggaggcgcccagttttgatttggccaattgctccctcagggcaccagtccacctatgcctcatagctgctgtagcttggaaattgtatcaaaagtctggaagagtctgattctttttgttgttactgttggtaagaatgctgccggcccttccacagcccctggtgcccacctgccatgctgccaggccggatctgagagcgctgggttgaggagactcaggccttactaaaccagccacgctcgctcccacagatggagcaccctggcattttccagcaggcgacaggtccgagtgccttgccctactttattctcaggaacttggaggtgcagtgaggggaagtgactggccaagggccaggggagtccagtgacgcgcatcccagcgcctcctccccagcagcctggcctgttataaatgggaatcaagccagtgagctgcctggatccatggttcccatagaccaacttcatcctgggcaaaagacaagaaggatgagggagggagagtttcagcaagtgcagtggactcataagccctgctcctcacatgagacctttctagcttgatagcttgagcgtgtgtgtgtgtgcgcgcgtgcacgtgcacgtgtgtgttttattttagtgttcataattggacaaattagcttcgcagttttaatgcaacactttgaacacgccaggcgctaaagactttacaggctggacacggtggctcacgcctgtagtcctagcactttgggaggccaaggcaggtggattgcctgagctcaggagttcgagaccagcttgggcaacacggtgaaaacccgtctctactaaaatacaaaaaattagccaggtggtgtggcgtgcgcctgtggtctcagctactcggaagactgaggcaggagaattgcttgaacccaggaggcagaggttgcagtgagccgagattacgccattgcacgccagcctgggtaacacagtgagactctgtctcccaaaaaaaagaaaaagaaaaaaatacaaggcagtggcttgcagtggttcacacctgtaatcccagcactttgggaggccaaggtaggaggatcacttgagcctaggagttcaggaccagtctgggcaacatagtgagaccccacctctacaaaaaaagaaaaatcagccaggtgtggtggcacatgcctgcgaccccagcatcttgggacgctgaggcagggggttgcttgagcccaggagtttgaggctatgattgttctactgcactccagcctgggagacagtaagttcttttctcaaaaaaaaaaaaaaaaaaaagccaggcgcagtggctcatgcttgtaatcccagcactttgagaggccgaggcgggcggatcatgaggtcaggatttcgagaccagcctgaccaactcagtgaaaccctgtatctactaaaaatacaaaaattagctgggcgtggtggcaggcacctgtaatcccagctatttgggaggctgaggcaggagaatcgcttgaacccaggaggcagaggttgcagtgagccaagattgtcccactgcactccagcctgggcgacagagcaagactccgtctcgaagaaaaaaaaaaaaaaaacaaaaaaaacaactgcacattattaaacccttggcagttgggcctcctgtcaccccattccacagctcagtaacgtgaggcccagggtcacacggccaattagtggctcaatcaagactccagaccttggggacagcggccctgcctgtgactggcacattgggctgcgtggctgtgctctgttgtcccaggctctgttgcctatgagggtgtggggagtgcgacgccagcccctgttctcctgtctgggaagcctcctggttcccacgccttccctgctggcaaggccaggaaatgctcttgccgctgcccccccttgccaggcttggccttgtactcacagtgacccccgctctcccccagattcttctgctgatcgacattgagcagtcctacatcaacacgaaccatgaggacttcatcgggtttgccaagtaggtacttttagagactggctggtcgggcggcaccaatcctcactctcagatccaaggaggtgactgagttgggattctctgagagggcaggtgtcagacagtctctgtcgggggtcctggggtgaaggcagagccaactgagaatatctggaagctctcctgggctgatagtggtccactgtccccaaccaacacgccttctgtgaggcatccccatggttagtttagggagagggcagtgctatgttcagatctgcagggagagggggaagccagccagctgctgcaccccctctccttcaggacttctcagagcctttagcgaccagtgtgcagcttttcccagactctgccacttcatggacagcatctcatgggctcagggctccggaagctgctctttgggaaatgctgcctggggtctccctagcttcaaggcatacactgtagatttaaaccagaaccttccgtggcacccagatgagggcccacatcggggagccctgatttcagcaggatgtcgattcagtgtgcgtggtctcaggcatcacccgctgattccttcagccccttggcatgcttaggcctcactcagattgttggagaggctcacgcaggccttcctgcctgaggcaggccgggtggtgccgctggtatgccctctcgctgggccctgtgatagagcagtgggcaaacccacacccagctccccaccctcagaggaagaccacatgcagggaaccgatggggacccagggcgttaaggtgtagtgtgcttagtgctgggcggggccgtgcagggcttgtgggtgtccagagggcggccactgggccttgccttgaggggtcaggcaggcttcctaggggagggcctctagagccaaatctcaggctatggagtcaccagatacaacatttatcggtgcacctgacaaagctgattgaggatctgttccgtgctgggcaccaggtaggtgaggagaagggaggaaggaaaacgaaggaatgagggcctcatcagaacccctcctagagatgagccgaagtccctgactgggcctcccctgcctgtgggtggcagcccccggccctgtgctcccggccgccgggtgtgtgtgggctcacagcgctggtccccatctttggtttgctgctgttttcctcaccttgatgtctctgcttctcacacttcatccacagttccttctcacaatctctcctgtttttcctttgaccactctttcctctggattcctgggccttcccacttaccccagctgttactatactgagcagctggtgacctggtgggtattgcctgctgtgtgcctttgccctggtgtgtgaacggggtacgccctggctgggtggccccagccctgggtgggacatccctggggcccgctgaagagctacggggtgctctctcagagccagggccagtgctgggcctctgggccaggaccttgaccgcaccagctgtagcccctgctgtttcagagcctgcaggctggggaggtggagtccttaaacaaattgtcacaaggatgatgagagtaggaagagagggtaggggatagactatgggaaaggggagctgggaatgtggcctggagagatcttcctgaagaagtcaggtgatgccagggggacccagagaattggacccagggaaggaaggctaccagaccaggcaggtagaggtaagagagccagcggccaggccccatcgccaggagggccctgcaggtccaggggaggattttggattttcccccaagacaccaggatgcttctgattagatccaggcccaggagaggggccaccttgtgggctgctatttgagggagccctggcaaggatgggagccaggaggcccttaggaaatagcacctctggaacctcactgtcacccagccatcactgtggaggttggctcagctcagtgccacctccttcagatgctgttgatgaaaatccttcttgtgcttgaatgttctgggcttcccattgccctccaaatgtatattataaacagggcccaagcctggcgcagtggctcatgcctgtaatcccaatactttgcaggaggccaaggtgggtcgattgctggagcccaggagtttgagaccagcctgggaaacatggtgaaaccctgtctctacaaaaaatacaaaaattaactgggcatggtggtggtgcgtaatctcagctacttaggaggctgaggtgggagaatgacctgagcccaggaagtcaaggctgtgctgagccatgatcacaccagggctctccagcctgggtgacagagtgagactctgtctcaaaaataaataagtaaataaatagcccagataagaagccctataataaacttactgaatgttgggaatatcactggataaaattctgcctttgttcttagttttccagcctttcctgatctagaaacagaagcctactttctcccttatcctacagccaacttggactttaaaacaaaacccccgaggtagtcagcaaaggaaggtgaccaagctgacttgcttttccatattgttctgaaagtttcagccaaagcaataagaaaagacaagaaaatatgatggataagtaacaggagatatatgttgtttgcaagtggtgatatgattgtcagagtagaaaatatattagaaccgtaaggtggtggagtaggtgtccacatataaaatatagtgggatttgtctatgccggcatgaactagccaggaagtaggatggataaagaagaaaagagatctgggattgtggatgaataaggaaccttatagaaacacaccctgtcgaccttggatgtcctctaaatttgggtcaggagtcatgcaagatatgtgtcatttcatgaccagcagctgtcccacagtctgatgtctaagactggatggctctgtggttagagccacttacaggctggtgttgggatcaaatgatgagaagagtaggaagaagggccaggtgcagtggctcatgcctgtaatgccagcactttgggaggtggagccaggcagatcccttgagtctaggaatttaagaccagcctgggcaacacagtgaaacctcgtctctacaaaaaatcaaaaattagctgagcatggtggtatgcacctgtggttccagctactcgggagactgaggcaggggaactacttgagcccgggagggtcaaggctgcagtgagctgtgattgcgccactgcactcatcttaggcaacaccttctcacacttccccttagaaactccgggattctagtgacatctggaagtaacctgcgctttagtaagtcggctgagatgagggcctagaagcctcaattgaaccagatacatttacttgttccgtgtgcccaggccgtttcccttgcgcagctctgtgtgtgcagggggcttctctctgcctctacctgtggctgctcacttggtccccagggagagaacggccacattcgcctcttccccttcttcccccccggcatcttgtccacgtgaaccctgtctgttctttggtttcagtgcccagcagaggagcacgcagctgaacaagaagagagccatccccaatcaggtagcacacccctctgcagtctcccgctctaccctgggggcgggaggacgctaagtgacagctaagcccccgtgatggagctcggcctgtgtaaagccccaccccacagcctcagtaccaggccatctgctctctctagaggccacttaggaattgataattctgggagatggcctgagagccaacactctggcagggcctagtgggcacattttacccacccagaaggccctatgtgccatccaaggccagggttagaacttgactcttggctgggcacagtagctcacacctgtaatcccagcattttgggaggccgaggtgggaggatcacttgaggctaagagtttgagaccagcctgggcaacatagaaagactctgtctctacaaataataatatttaaaaattacctgggagtggtgggctcatgcctatcaccccagctacttaggaggccaaggtgggagggtcacttgagcccagcagttcatgaccatccggggcaatacaatgagacctcatcttaaaaattaataataggctgggcacgatagctcacacctgtaattctagcatgttaggaggctgaggcgggcggattgcctgagctcaggagtttgagaccagcctggctaacatggcaaaaaccccatctctactaaaaatacaaaaaattaaccaggcgtggtggcacgcgcctgtaatcccagctactcaggaggctgaggcaggaggattgcttgaaccttggaggcggaggttgcagtgagccaagattgcgccaccgcactccagtgtgggtgacagggccagactctgtctccaaaaataataataataaagatataaataagaatttttcccttgagcgggggtctgtgacctctttgagctttccaacacagccccagggattgggagcccctaggtgagagccgctggaaactacattgtcactagcagctcaggggagcttgggatagttgaagccccacacctggagaagccctgagccacaaagggttgtaccttgacatcttaacccagctagaggccttgtgaaatatgaacggctgtatcaatgcctgccttcagtaccttattattattattattattttgacacagagtctcgcattgtcacctgggctgcagtgcagtggcgcaatcttggctcactgcaacctctgcctcccaggttcaagcgattctcctggttcagcctcctcagtagctgggattacaggtgctcaccacaacaccaggctaatttttttttatttttttcttgagatggagccttgctctgtgtcccagctggagtgcagtggcacgatttcagctcactgcaacctccacctcccgggttcaagcaattctctgcctcagcctcctgagtagctgggattacaggcgcccgccagcacgcccagctaatttttttgtatttttagtagagagggggtttcaccatcttggccaggctggtctcaaactcctgacctggtgatccacccgcctcggcctcccaaagtgctggaattacaagcgtgagccatcacgtccagcctttttttttttttttttttttttttttgagacagagtctcactctgccaccaaggctggagtgcagtggcgcggtctcagctcaccacaacctccgcctcctagcttcgtgtgattctcctgcctcagccttctgagtagcgacgattacaggagcctgccaccacccctgactaatttctgtatttttagtagagacagggtttcaccatgttggccaggctggtctcgaactcctgaccccaggtgatccacccgcctcgcccggacaaagtgctgggattatcatgccagcctttatcattaatttttaagaaaacctggacgggcacggtggctcacacctgtagtcctagcactttgggaggccgaggcgggcggatcacctgaggtcaagagttagagaacagcctggccaacatggtgaaaccccgtctctactaaaatacaaaaaattagcctggcatgatggtgggtgcctataattccacctactcgggaggttgagacaggagaatcacttgaacccaggagatggtggttgtggtgagccaggatcacaccactgcactctggcctgggcggctgagcgagactccatatcaggaaaaaaaaaaagaaagaaagaaaaggaaaccataatcttcgcaaaatttctgcctatgtccctcccttctccccattgggcaggggtgggggcggggactccaccatgtaccttgcacgatcatagagcctactggaaggaagaacgtaaccattgcatgatttatttttgcgcttgccgtaggtaatacatatgttgttgcttttttgtttcttgagataataatgaattaaatattaacaccatgaatatgattaatagcatgtaattttttttcttttgctgttttttcccctgctcttctcttctcctgtttttgtgcttttcctgctttttctttgtccccttcacgtcccttccatctcttttcctttgcctgctcttccctgatttacccacaaccctaactttgcatattcaaagggggagatcctggtaagtacatgcttagtgtggtagcaaacattagagaatctagtggtgatggagaccccgcccacccctaatattccctgttccccatcccctccaaataacaaaaatactaaaaatcgagctaacctggaaaccccatgccgcagccggcgctggactgcacgttgccctgggtataagtcgactcacacaggcactaactggaccgccacccttgaaggcgcacttctgcagccagttcctggcaggttttcctggtttcctgtaggtcagggatggcaaatacttacacaccgcccctgcctcccctcacatccctggctgtggaagatctcgcttaagccagaccagaattcattcttggcactgcccctcctccttctatctcctatgcagatgtcactcatggatcagagcatatttttccacatggcagaaatcttgccctcttgtgcccatggcagacatggctagttgatctagcactctttgccttgtgccgctcctctagcacacgcccatggcagacattgctaagcaatcctagcattctttccaaataagcttgccagcactcctgttctatagcagatgtggctaagtgattaaggtattgtttttctccctatatgataccctcttctctatgcatggcaggcatgactagtcaatcaggagcctctttcctagatgctgcctcttgtcctccagataaattgatgaggctcttctgttccacttaccctttctcctatccttggcctgtgacaggcaacactaattgatcctagcaccgtttcctgccacgcccagaattctcaccacagtgcttcaggtatcttgtaccagtcgattgacatggctcccgagatgaatcatatttgctgtccatccctgctgtgggtaacacctccttcctttgtgcagaaccctcagctggggcccagtgtggggcgtgagatgggcgtgaggcccagtccagcccagcccagcgggaagcagcctgctactcatagctgagaactgaacccagctcaaggagctcacctctaggcagccggcctcagcccggctcttacacttggacagcacagcctgggcctccagtcctagcaggggctcccttttgctggacattctcccactgccagccaccaaggcgctggtcatccctgccactgccctctggcggggctcttctggcaatcccagggtctttcttgtagctgagccgatcctatgccagggcctcgctgctcccagggcctgggtgtgcagatagggccatgggtggggcagtgacgggaggaattagttggcctcgggcttgtggttttcaggttcctcatgtgttccccccagtccctttgaatttgccaggccaagaccaggaacctgcttctcccttgtaccccaagaggtttaggggttcctcttttcctaccagaggccacatagcccagccccgtcatgagcgtggccgtggcctctgggtctcccatctgtggttcccatctctacccgggagactcaggccaggaccctcacccaggaaagagactggagcagcctgccagaggatccctgctttgccgccccctgcctgccctgccacccataccgccccatgtgcctgcctgcctgtcactgtgcaccctagcccgcaacggcctgccgcctcttctgtctctcccacccctacttccttctaagcccagtcccattgggatgtgtcccttggatgcaaacctgactttctgctgaggcctggctgctccctttctctggctcacaagtggtggatggctaacgggcctttgtttgccacccacagcttgcagctccctagggtgggattttgtctctgaacccgtgtggagaagggcacctcagggcttctgccagacgtcctgccccaaggcttggtgtgccatccccagcatggccccgatcagtgccctggccctgtggccatgcaccccaaagtgtagcgtgggccctgtgctccagctctgaccaacactaaccccggctggaggcaggagagccaggccaccgaggggtgtgcgggcacatccctctccttagaaaccgggccaggcctaggagtatggaggcctcacatttctctgggggagcaccgacagcctgtctccctgttttccctcacctggttgtcattcagtcatggaaccagggtctactaagcactcgttctgtgcccagctctgggctgagacaaggcagtgcccccaccccgctccccccgggtgaatggaggcattcccagactgccagacctttggtgctaacaccaggacgtcctggacagaccaggaagagctcgtcactgcgttcccagaggggatgctgtgacctcacaggggctgctggcctcagccccctcacccaccaccaggcagcccgtgaatggccagatgccaggggtcactgcctgctccaaacaactgtgagagtcctgtctgctcatcccagggagggataagtctgtacccttggccttaacaaggggcgcccggtggcatctcatgctgtccccagcctgggcagtgacttctgcatggtccaggggtccctgggtactctttagccacctccgtcttcatggccacctggggcttagcactcacatccagccaccaaggagccgctggagctgtgggctggtggccctggttcagaatgtcaggcccggggtgggtcggggtagtccggatgaagcccctccagaggaccgcccccgactaggacagcatctgggccccagagggattcctggaggccccatctctggcgctcctgccgtgccgtgccctgccatgccctgcactgggggatgcaggccagcccttcgcagctgtccatggccatgctcagcccaccctttgtagcttggccaagtctgtcagtgcctgggtcccaggccgccctgtgcgtgcctccgtgtgcttcctgcagctcccagggccctcgtcctgagtggggtggggggctctgcccacacatgcctccagcggccagggagcatgggagcacagcccccaggctgcctgccgttagttgtcaggtgagtccctgcgcaggcctgggttctgacccccacgcagatgacagctacagccacacaatccccatccatggggtctcccagcctgaaaccctgatgtgtcagtcaaaaggatgaccaccaggcttgcagccagcttgggacatgagccgcgctccttcaatgtccttggggagggcccctgggctcacacctttgaccctagccctctgtgtggatgctacccttggaaccttatctcacgcaaacaagtgcagttcctcagatgtcacatttcatgtgccacagccccacacacaagccccagggactcctcccatgggcccctttccatcaggcctctgtgagtctataccccatcagcccctggcccagtgagtctgtctgtccgcccacctgcccaggtggcgcctcatgttggtttcctgctggaaatgcttgggacagggtggaactgggtttcctgggctttggggctggaggtgtctctattgcggtccctggcttcccactgagctgtgggcaaggctgctgcgctgggggatggctggggcacggagcgaggttccctgctaagctgcgcgctttcccccaggtgatccgcaggggctggctgaccatcaacaacatcagcctgatgaaaggcggctccaaggagtactggtttgtgctgactgccgagtcactgtcctggtacaaggatgaggaggtgagtggcaggcgggagcagggctgctggggtaggtggggcagccagggaagagcgggtgggcgctccctctgggcagaactcagtcactgcgccactctgccctgagtcaccattaggactgtaactcgccgggcacggtggctcccgcctgtaatcccagcactttgggagggcgaggcaggtagatcacgaggtcgggagtttgagaccagcctggccaacatgatgaaaccccgtctctactaaaattgcaaaaattagccaggagtggtggcacgcgcctgtaatcccagctactcaggaggctgaggcaggagaatcgtttgaacccgggaggcggaggttgcagtgagccgagattgcgccactgcactccagcctgggcgagagagcgagactccatctcaaaataaacaaacaaacaaacaaaaaacaaccgtaacccagggctggagagcagccaccatgtgccaaaaggcttacattgtacctggcccccatgggaccagctcctagagtgcaaaagggagatggagggtgatggagtcactagcaggctagaaacaggccctgacctccagtgccactgtgactgccccgtgctcaagagaaggggccatgcccaagggtcaggggctcaggcatgcagccagcctccaggggcaccggggttccatcacttacacctcagtcaggccccttgcctctctgggcctcagtttttctatctgcgaagtggtctaggatggtccctgcccactgtgcggtgcttggccacagtgtgcagaacgatccccacatgctcgtcattatgggaaggaagtggagaggcccctgggtgatgactgcagggagcagtgttgagtgctgagtcatgggagggactcgttcactgcgagtgagggggcaggccttgagcaaggatactgccaaccggcctctgctctccatgctgacccagcatccctcctgatggtcctatgtagaaaaagatacataatgtttgacatatttatggggtccctgtgatgttttattagatgtacagagtatgtaatgatcacggcagagtgtttgtggtgtctgtcactttggtattcctcattttcctgtgttcagaacagttcaggtcctctcttctgactactttgaaatacacaaggctgggcacggtgcctcaggcctataatcccagcactttgggaggctgaggtgggaggatggcctgagttcaggggttcaagaccagtttgagcaacatagcattaccctgtgtctattaaaacccaaaaaaaattagctgggcatggtggtgcatacctgtagtcccagctactcaggaggctgaggtgggagggtcacttgagcccaggagatggaggctgtggtgagctatgatcacaccactgcactccagcctgggccacagagcaagacactgtctcaaaaaaaaaaaaaaagaagaagaagaagaaatagacaatacgttgttgcattgttggctgggcacagtggctcatgcctgtaatcttagcactctgggaggctgaggtgggtggatcacctggggtcaggtattcaagaccagcctggccaaacggtgaagccccttctctactaaaaatgcaaaaattagccaggtgtggtggcgcacgcttgtaatcctagttacttggggggctgaggcaggagaatcaccggaacctgggaggtggaggtggagtttgcagggagccgagatggtgccactgaactccagcctgggcgacagagtgagagactccctctcaaaaataaaaacaggctgggcgcagtggctcacgccattaatcccagcactttgggaggccaaggcagacagatcacttgaggtcgggagttcgagaccagcctgaccaacatggagaaaccccgtctctactaaaaatacaaaattaatctggcgtggtggcgcatacctgtaatcccagctactcaggaggctgaggtgggagaatcgcttgaacctgggaagcagaggttgcggtgagccaaaattgcgccattgcactccagcctgggcaacaagagtgaaagtgtgtctcaaagaaaaaaaaacaccagacaattgttgttaactatagtcttaactgcagtcaccctactcttctgttgaacaatagaagttaatgccttttctctaactgtatgtttgtacccattaaccccacctctctttaccccctacttgtccccacctttcccagcctctagtatttatccttctactctccacctctgtgagatccgctcttctaccttttatttttttagctcccacgtatgagtgacaacatgcaagatctgtctttttgtgcctggcttatttcacttaacataatgacctccagttccattcatgttgctgcaaatgacaggatctcattcttttctatggccctgatcaacccgtttcttgcttaattctcttgacgtaaccatggcttagtggcctggaagggaagccacttctgtgtgatagcttgttgctactctgatgcggtccaggttggctttcaagagtccctggcaaagagagctgtgtttttctcattgtcctggttgctctgggagaagactgcaggctgtcctgtgagccatggctgtgttatgtgggcaatggatttgcgtctgtaacagaggcccaaaatgaaggctcttaaagagatgaagtctgtttcttgctcacgtctcagtgagcttggtgaccctgtgctgcaaggctgtccagggcctggctccgcgtctcctgttgccaccttaacacagggctcccttcatagtttaaaatggctgccccatacccatcaccatgtagcctctagcagcccaagaagggaaagaagggcctctgtgtgtgggaactgtgagtccagctaacagttctagcactttctaagaaggaagtggatattggttgtttctgagcgtgacagctggggcttgacacccggaagtcaccaggatattggttgggtggtgtcaacccttcgtgtctcgtctccccacctataaagtcaggactctggcctgtcccctctggactgcgggaaccagtgggggaattctggtacttgagcccaggactgtgcctggctcactgcatgtgtcccaggttttgtcctggtaactaccagcatcaagtcctcccagctcctctctgtaggagggaacctacccacctacccccagtgcacagaggaggagctggaggctgtgtcaggtgcagggccagctggccagtccccatggtccctgggatggcacagccaccaactcagtccaggcaacctcagtggagaggctggggttgcctgaggcccctggagccgccctgcctggctctcttccccttgggtttgggggaatgctctgtaggagtgccccccactggggacttgctggcacccaacccagccccaggataggcaggactgggcttggaagtcccagacttagagagaaggcaggctggggggccccggctggccccagggagaagcaaagagaggcgggcctcttggctatggacccctgctctgtgctgggctcattggctaagagagcccactgaggccacacctgaggagaaccctactccccgtgaggaaaccctcacgcttgctattcgggtggctctgtggtcacccccatctaaggctctgagcggtgacttgccccacatcatggagcgggggagggtccccctggggtggaggcttccccagtgcacgtctgcgggcccatgctccctgacctgagggacaccccagcccgacatccgaacacctccgctgcagcccaggcctgatgtccccttgactgaggacattgggggtgaaaggatcatcccgctccacatgaggccagacgctcatctctggaatgttcctgaaacctcaggagccctgaggcttctgcgggactctggggcgctgtttctaaacccagggtggtggagtctgctgagccaccatacaagcatttctggggtccctgtggaagcttccagaacctcagatccagcgaacctcatggggttgggatgtgggaggagtgtggagccaggcgtggtctgcagccttctccccgcctcaggcacctctaggaactcacgtgtccagatcggatggctcctcaaaatggctggggtggggtagggtgccctttctctttttctcccctctttccgccttgcagtgagaaaccagcctgcgctgtggtgtgtgggctgtcaggccggctgagagctggtgccctgcctttcagttcagggctgtggggaccttccagggtcccctgggtgggaatgccaggcctggggcagcgagccttggaggagcctctgggcctgaacctcagcctggcagctctctgcctggcagcattgcaagtctagttttcagatctcctcttccttcacgtgaggggcccttcgtgtttttctcatctgagagttgaaagccagagcccccgaccctcccgtggagccccacactggagtctggagcagcagtgggagaagggccgggcgccggccgtaatgagaaacagccgacctgtgaaaggggccctgtgtgagccccagacacaaagcaggctccattcaggagggggcagccatggaacctgacccccgccaccacccaagttaggatcccagcagggacccttggagtcacacacgtggcagccacccctgaggaggaggccaccctcttagatgcctcagtgagacacaagacatcaatatctctttatttaaaaaataaacaagacatttacagccatggggtggggatggcagactgatagggccagggcctccaacccctcggccggcctcggggctccctctgcctttccccagtgcctcttctcccacccaggccctcgaatcttctatgcgaggctctgccacagtgggaaacggggtggtggaaaatgacactcacctgccggcgagtttggggggcctgtctcgacgagccgctcacccaagcccagcctaaccaatgtgcagactactgtacacattgagagcctcctgaacaggtagtctgaacactgggttggcggggccggctatccatcctgcagaaccccccaggcagacgctggggccaccaggccaggccgtgcctcagcacctctgagcagccaaggaaaccaccactcttcccgagacgatccgctctgtcccttctgacgtggcaaggctggggccggctcgcatctggagaaagttctgggttttcaggaaatcctaaagagtgggggaggcggagcaggaggcagggtttgggatcgtggcttctgggctcaggaggaatgtctgactctttgggggtcgggggtggggaggaggggcgcacacacacgtgtgtgtgtgtgtgtgcgcgcgcgcgcacgcgtgcgtgccggcagcaccaggaaggcggccactgatttctcggcggaatcgcactgtaaacagttccagatgtggcattagctggaatggcctgtgactcagttacttggccctgctggctggaagcttccggccgcgtgatatgatagggtcagggcagcaaaggcccttgggcaaacgtccgagccgggggcagggcttctgcagagccccctcccctagccccttctaaagcccccaaaactcttccccgaaaggtgggagggacccaggccctgtgttacccagccttgcctgggatgacgggtgcaggctttcttcatcaccttccctcccttgggtccgcagcggcatccctccctccatggccaccgggcccctctcctatgctctgctccctccatggccaccgggcccctctcctatgctctgctccctccatggccaccgggcccctcttcctatgctctgccctacttctttgcctagagcctggcaggctaatcctggagccgctcacaagagcaaccaaagaaaatcccgggtgctcatgggcaccagctctgcagtgggcaccaagctcctccatcctccttggatagatgaggaaactgagatgaaatgggaggtggcggggaagtggcttgcccgagggcacacggccaggaaagggcagggctggcatcacctcaaccatgctgagctcctaacgccctgaggctgagcccatgtgccaagcccactgcttcatcctggctccccttgcaaagtcctgacagtcccagctggcccccacttgccagggagcccccgctgccttctccacagtcactgtggctgctcctgaacttggaggcggcagccaggttaggctttgtgctggggcagcgcagtgaggggacatgagaggagtttccagagacggcccagggagaagaagggccaggggcactgtggggaggactgggctttgggtcacagagacctggcctctgaagtcctgctgtggcttgcgctgcctgccgtgtggccttcggcagccagcttccctctctgagctaggagggatccgtgaactgagaccaagcagtgcatggcatgggtccccaagagctgctgctgtggcgggtgggcacacacatcactgggtgagtgtgggactccagggtgccacccccagctccgtgactcgccagccccttgcccctggccgaggggcccacctctgagctgcctccctagcagtctggacagccgtggctggcacttggtgcttcctgaacagggccaaccttagaaagcaagtgatagggcaggtgcggtggtgcacacctgtaatcccagcactctgggaggctcgcttgaacccaggagtttaagaccagcctgggcaacatagcgagaccccatctctattaaaataatgataatgataataataaagaaagggagtaaggcttctgcagcacctggcccaggacctatccagccccaagatgtcctaaagcggccaaggttgaaatcccagccctgctcctctctgcctcagtcttcccctctgtaaaatggcatcacagaggtaactcactcctaggctcgtttcaaagatggagcccagataaaagttccattcacttcgtgcaaggcgaggggcagttgtgttgtgcgtgccgtcagccacatgtcagcagtgaactcaacaggagtccctgccctggagaaacttgagtcagtccagtggcagtcagccacctaggtcaataagcacaggcagtcaggcacctaggtcaacaagcgcaggatacgtgacgtgttgtgtgagggaaaaggaggatggaggtggggagggtgcgggtagagttagggcaggagggagccatgcaagtgtcaggatcaggcagtagcccggtcgtccgaaggccctggggtaggaacccaggtgggatactcagggagcatcatggagggcagcgtggctgggacagagtgacggacggggaagggccggcagatgggctcatatacagcagcgaccagcattgagaagcccccggggctggtggtggcgcatgctacacgctctggcctggggcatcctgagttgtcacgtggaccgctcagggtgactcttttccctccaccctcaggagaaagagaagaagtacatgctgcctctggacaacctcaagatccgtgatgtggagaagggcttcatgtccaacaagcacgtcttcgccatcttcaacacggagcagaggtgaggggcccaggggcctggggatggctcggggtgaagaccaatggcctcattcacactccacaaccttcactgagcactgagcacctggctgtcagcagtccctgcccttgggacccagcttttagaaaggggagtcacgtgagaaatagcaaatgccagggatgcttcccgtgctgggtcagagatgacctctctgggcagagatgaggatgaaggcaggctccgagtcagtgggagccatggagagttctgagcacagggtgaccaggacctggctcaggtgcttgcaggagccctctggtggctgagagggaaacagtatgagagggtgagagatgggggacgagggcaaaggccgctgccttgtccaagtgggcgatgatggggccagaacccatagggaaggagggtgcagattctgggtagaagagtcaggcggagccctggtgggcatggatatgagagagaaaggcaccaattgtgaccctgagtacgtgggcctgagctcctgcactgcccagctgctgccattggccgaggtggggaaggcagcggcaggtaggcctggagacagccaagagctccatttaggccatgccaagggagagggtgcatcagggaggcacctgggtagatcgaggagtgtgatgtccaggaacgagctccagtctgggatgtgaactgggcagtcaccattgcgtggatggtatttcaaggaacgaaaccagatgagctcccaggagagtgaagctggagaatgggaggccccaggaagctcacagtacatctgtcccatgaggcgtagctggagactttagcagagacactgctctcaggaagaaacccagctggcaggagggctcttcccatgctcacacaatcacgctcatccaggaagcagggcccacctgagtcagggattagctgtcagtaaaggcccggtggtaccctgagacctgtaggcaggcactgacgtcctccctgctggccccagaacctccttgcctactgcttggctacacccaccaactccagctgagtctcctggttccctcctgctttgctctggctggcctaaagctcgagacccatttgtccaccagctggccgtgaaaaccttcatagctcttctaggcttgcccctggccatatgacacctggcagctgtcccaggtccctgagccgtgtgcctcctgtacagggagggtgacaatattatctgatatatcttttaagagcaggttcaggaaacccagagtagtagctgcaaaaacaagataagatggttgatagttttttgtgtaaattaagtccagactttagtatcccgggcaaagtggagcagctccacaggcatcagggtccaggccctgcatgttcctcaggattccacctgatatgcagaagccgagctctgcggtgggacaggcctgccatgaaatcctgactttttttttaaacggagttccgctgttgttgcccaggctagagtgcaatggtgcgatctcagctcaccgcaacctctgcctcctgggttcaagcgattctcctgcctcagcctcccaagtagctggaattacaggcatgcaccaccacgcctggctaattttttatttttagtagagacggggtttctccatattggtcaggctgggctcgaactcccaacctcaggtgatccacccacctcggcctcccaaagtgctgggattacaggtgtgagctactgcacctggcccaaaaccccgacttctacttctttgtccaaaatggctgcccagactccagccattgtgatgatgtcccaggcagcagcaggaaggagaggaggagctacaagggcatgcctctccccacacaacctcatccagaggtcgttcggggcagccacttgctgaccacaaacccaactctcacttaaaggctttgtgggcagcttggctgtcttaaccacacctggatgtgggacaggaaaatgtgcgtggcatgtggcacggggcctggcctgtagaccaccatctgcaagcactgtttagcatccattccatttatctcccagctttgagaccctggttcttttttctttttctttttcttttttttttttttttgagatggagtcttcctctgtcacccacccaggctggagtgcagtggcatgatctcagctcattgtagcctccacctcccatgctcaagtgatcctcccgcctcggcctcccgagtagctgggactacaggcgcacaccaccatgcccagctaatttttgtattttctgtagagatgggggtgttgctgtgttgctcaggctggtctccaactcctgagctcaagcaatccccctgtctcagcctcccaaagtgcaggaattacaggtatgagccaccatgcctaaactttacaaaaatttttttgttttgttttgatacatagtctcactctgtcgcccaggctggagacagtggcacaatcttggctcactgcaacttccacctcccaggtttaagcgattctcctgcctcagcctcccgagtagctgggattacaggcatgcagtaccactcccagctaattttttgtattttagtattgacggggtttcaccatgttggccaggctggtctcaaactcctgacctcagttgatcctcctgcctcagcttcccaaagtgttgggattacaggcgtgagccactgtgcccagccaaaactttttttataaaaaacacacaggccgggcacgggggctcacgcctgtaatcccagcactttgggaggccgaggcaggtaggtcacgaggtcagaagatcgagatcatcctggcgaacacggtgaaaccccgtctctactaaaaatgcaaaaaattagctggggtggtggcaggtgcctgtagtcccagctactcgggaggctgaggcaggagaatggtgtgaacccgggaggcggagcttgcagtgagccaagatcgcgccactgcactccagcctgggcgacagagcaagactctgtctcaaaaacaaaacaaaacacattcgggcacagtggctcacacctgtaatctcagaactttgggaagccgaggtgggcggatcagctgaggtcaggagttcgagaccagcctgaccaacatggagaaaccccatctctactaaaaatactaaaattagccaggtgtggtggcgcatgcctgtaatcccagctactcgggaggctgaggcaggagaatcgcttgaacccgaaaggtggaggttgcggtgagccgagattgcgccattgcactccagcctggacaacaaaagcgaaactccgtctcaaaaaaaaaaaataaataataataataataataaagttctggtggacagtgctgctctgggctttcctgaaaatgccccagtgggagcttcccagccacagttggtgtcgagggtcacatgcccacctctgggggcccaggaaaagagaagagtcagctgatccaacagaaacaaagaaactcagacacttgccgagcttgtgcacagcgctcttctgtgtaggcgtcactcacggtgacccctcagcatgaccaggtgaagcctgggttgggtttgggttcctgatcagtcagaaagacccctagagcccattcctctcggcagtctgccagacccatggcagggtcaagcttgtgcccctccttccccacccccccgcagaaacgtctacaaggacctgcggcagatcgagctggcctgtgactcccaggaagacgtggacagctggaaggcctcgttcctccgagctggcgtctaccccgagaaggaccaggtgaggagccgtcctgcgcagccaggcccagagcccccacctgggagaggaagcagggctggctttccccaggacaggtcattttcaggccatgttagccaggagtctctgaaatcatgtagcagatgcccacttgagcaagcaaaggagaaattgggggtactttgtcatcagggcccagaaagttccctcacggaagccagtgaccggggcacacaggggatggggtcccacttgctttgttctcttctcttttccccttccatcctgaggtagagtgaacatggccacccttggccccaatattaaaatgccttgccgggcacggtgggtggttcgcccctgtaatcccagcactttgggaggctgaggtgggcagatcatttgagctcaggggttcgaaaccagcctggccaacatggtgaaaccccgtctctactaaaactacaaaaattagccaggcatggtggtacgtgcctgtaatcccagttactcaggaggcttaggcaggagatcgcttaaacccgggaggtagaggttgcagtgagctgagatcacgccattgcactccagcctgggcgacagagcaagactccatctcaaaaataaaataaaatgtcccaaggttgggtgtggtggcttacacctgcaatcccaacactttgggaggcaatgtgggcagatcctttgggcccaggagttcgaaaacagcctgggcaatgttgcaaaacccttctctccaaaaaatacaaacatacccaggcatggtggcgcacccctgtaatcccatctactccagggcgctgaggtgggaggatcacttgagctctccctgggaggttgaggctgcggtgaactgtgtttgtgccactgcactgcagcctgggtgacatagcaagactgtgtcaaaaaaaaacaaaacaaaaaaacaacgttccaatgcccaggtgaggggatccaccccagcatcagccagggtcaccccattgtttgggcagctctggcccagggcaagcaggcctatctggtgccagtggggctgtcaggggccagcctgaggtcagttattggtgggacaatagggcagatggtttccagagaaccaggacttggcccaggccacagtcacccctcagcacctcccctcccgcttgcaggcagaaaacgaggatggggcccaggagaacaccttctccatggacccccaactggagcggcaggtggagaccattcgcaacctggtggactcatacgtggccatcatcaacaagtccatccgcgacctcatgccaaagaccatcatgcacctcatgatcaacaatgtgagtggagaactaaaaatgagaaggaggtagctgggtgcggtggctcacgcctgtaatcccagcactttgggaggccaaggcgggcggatcacttgaggtcaggagttcaagaccagcctggccaaaacggtgaaaccccatctctactaaaaatacaaaaattaggctgggcgcggtggctcacacctgtaatcccagcactttgcgaggccaaggcgggcggatcacgagctaaggagttcgagactagactgaccaacatggtgaaaccccatctctactaaatatacaaaaattagccgggcacggtagctcacgcctgtaatcccagctactcaggaggctgaggcaggggaatcgcttgaacccaagaggcagaggttgtggtaagcctagagtgcaccactgcactccagcctgggcgacagagtgagactccgtctcaagaaaagagagagagagagagagaaaaatacaaaaagtagccgggcatggtggcgggtgcctgtaatccagctacccgggaagctgaggcaggacaattacttgaacctgggagatggagatggcagtgagccaagatcgtgccactgcactccagcctggttgacagagcgagactccatctcaaaaaaaaaaaaaaaaaaaaatgagaaggaggccaggcaccctaggccatacctgtttgtagtcttagcactttgggaggctgaggcaggaggatcacttgagcccaggaggttgaggctgcagtgagctatgatcatgccactgcactccagcctgggcgacagagcaagaccttgtgtccaacaacagcaacaacaaatttgaatgaatcaccaccctttgaacaccagaatctgcacggccatcctctttgggaaaccctagggtttccgagccacactgggtccatagtcccatcaagtccactaactggagtgaacactgcaggtgtgcgccttctctgaattaacttaggctggcatcagaataactgcaggagggagaacggccatcttccccatttcacagacagaaaacaaggccagagagatcaagtaacctgccccaagttccttaggaaagtgggaagtgggattcaaacccacgtttaccctggttgcaaccatacccttgggttgtgttgggcagccgctgtgtcctaatgatctggggcccagcctcttcctcatgggcgtcacccgcctggccccgggttccctggagactctcagggctctgggctcctcttcagtgaaatgcagctgtactgatagtatctccagctcaggctgctagagggctcagggcacttgtgtatcaggcctttggcatggcactagccactcaggaagctttataaaccagctttggggccggagcagtggctcatgcctgtaatcccagcactttgggaggctgaggagggaggatcacttgagcccaggagctgaagaccagcctgggcaacatagccataccccagtctctacaaaaaatttaaaaattagctgggcgtggtggcaaatgcctgtagtcccagctactcagaagaccgaggtaagagcatcacttgagcccaggaggttgaggctgcagtgagccatgattacgccactgctctccagcctgggtgatggagcaggaacctctttcaaaaaaaaagtgtcttgggttttgtatatgaatgtcaaccacagaaacctgcggatctaagtaaaactcccacacagggtgtggctgggcatggtggctcacatctgtactcccagcactttgggaggcttggcaggaggatcactcgatcccaggagttcaagaccagcctggacaacatagtgagaccccatccctatttaaaacacacacacacctcccacgtgccatgccctcccaccctgttgctcccattctcagtagtgatcagtgttcacagtttcatggtgtcctggtatgtttcctcatataccgataggatcggagacatatacggttcttctgctatgaaatttaaaatgcatatatcctttgaccctgcaagtttacttttaggaacttctctaagagagacaattgcccacgtgcaaagtgagcttatacatgcttattgttttccatgatgttttatagcagccaaagatgggacataattatccatttttaatagactcttataaaataaaaatattttattatttaagaaaataataaatctgtcggcccagctactcgggaagctgaggcaggaagatcacttgagcccaggagatcgaggctgcggtgagcaaagatcgctccactgcattccagcctgagtgataggagtgagaccctatctaaaaaaaaaaaaagttgtgacggccaggtgtggtggctcatgcctgtaatcccagcactttgggaggctgaggcgggcacatcacgaggtcaagagactgagaccatcctggccaacatgctgaaacccccctctactaaaaatacaaaaattagctgggcgtggtggcacgcgtctgtagtcccagctactctggaggctgaggcaggagaatcacttgaacctaggaggtggagtttgcaatgagcggagatcatgccactgtactccagcctggtgacagagggagactctgtctcaaaaaaaaagaaaaaaaaaagtaactgaaaaacttctgtatccagtaggaggttccagaaaggacaatgtataaaattcatgaacagaaactagtagtgtttgaacagaagccaggtggaagatgtaacaggattagccgggcgcagtggctcactcacgcctgtaatcccagcactttgggaggccaaggcgggtggatcacctgaggtcaggagttaaagaccagcctggccaatatggtgaaaccccatctctgctaaaaatacaaaaattagccgggggttggggggcacgcctgtagtcccagctacttgggaggttgaggcacaagaattgcttggacccaggagacgcaggttgcagtgagccaagattgcactgcagcctgggtgacagagtgagactctgtcacaaaaaaataaagatataacaggattggctgggcgcggtggctcacgcctgtaatcccagcactttgggaggctgaggcaggcggatcataaggtcaggagatcgagaccatcctggctaacagggtgaaaccctgtctctactaaaaatacaaaaaataagctgggcgtggtggcaggcgcctgtagtcccagctacttgggagactgaggcaggagaatggcataaacccgggaggcggaggttgcagtgagctgagattgcaccactgcactccaacctgggcgacagtgagactgtctcaaaaaaaaaaaagcaaaaacaaaaaagatataacaggattattctgccaaggttaaggaaataaataaataagctaaaacaggagaaaagacatcaatggaagaggcaagatactagaaataagttgaataagaatctcataaccagcctgggccacatggtggaaccctatctctaaaaaaattacaaaacttagccaagcatggtgtcaacgtgcctgtcgtcctagctacttgggaggctgaggcaggataattacttgaacccgggaggcggaggttgcagtgagctgaaattgagccactgtactccagcctgggtgacagagcaagactctttttcaaaaaagtctgggggtggccccgccctgtgagagatgtttttccagcagtcactgtgggttctgggttggggtgatacacaagcctgaccctccccaacccctgcccgcagacgaaggccttcatccaccacgagctgctggcctacctatactcctcggcagaccagagcagcctcatggaggagtcggctgaccaggcacagcggcgggacgacatgctgcgcatgtaccatgccctcaaggaggcgctcaacatcatcggtgacatcagcaccagcactgtgtccacgcctgtacccccgcctgtcgatgacacctggctccagagcgccagcagccacaggtccggaagcctggttcccctaccctcaagcattcggcctgcaggttcctgccctccctgtgtgtcctgcagggtcctggcaggaaacaggacacagcccaagggtggcacccagggctgggcactgtgggagctgctgccctgctgaggccggaggagggagagaaggggtatgggggcgagccagccctacagctctagggcaggaccctgtgaataaataccccgcctgccctctgctggtgccttccattggcacagcccaaatggaagctggggtaagaggctggaggggcagcagccacaggagagagatgagcctcctggagcacagagaagggcagatgggaggctctggaggggcaaacgcaaggcgtggccagagctgctgccgcccctgagttgtccattgaggccgtcgggcagggaacctcagagggggctgccttgcagagccctgggggagccatggagttccttaaggggaggatatcgcacccaggcctgcaggtggcagggactgaggcccaggagggaatctggatgtctggacagggcttgcaggttccacggcccctagagatattagggcttgatctggaggactctggaagtgtctttggctgtgagggtggatcccaggcccaaggcctgagggggccctgtgagtgggaagtgcctgagggggccgagggcaagggaaggtgggactggcgctcaggttggggtgggaggatcccactgcgcctgcgctgtccccatagccagcccccacctcaggttctggcagccacagtggcatggcgggggctcctactccatctgtatctgtagctcacaccctctccttcctcacagccccactccacagcgccgaccggtgtccagcatacacccccctggccggcccccagcagtgaggggccccactccagggccccccctgattcctgttcccgtgggggcagcagcctccttctcggcgcccccaatcccatcccggcctggaccccagagcgtgtttgccaacagtgacctcttcccagccccgcctcagatcccatctcggccagttcggatccccccagggattcccccaggagtgcccaggtaaggccaaccccctgccctccaccccaactgcctgcaccctggggtctctcctcctgtctcacttcctcccagtgagctctcactacgtgcccagctgctggagtggaggaatcgtcctcatccctatttggcttgcgaggaaacaggcccagagaggccaagaggcttgttcagtgtcacagagtagcggagccctggtgactccggggctcccagcttgccctctgcctactggggtgtgccaccaggcagctggggaaccctcacactgggcacctcctcccactgtttaccttcttctccttcctgctcctgcctgcctcaacctaccgtgggccaggctttattctccccacttctccggtggggaagctgaggcccagggagggcagggggctcactgagggtcaaacagcaggcgagttgatgcctaggtttggcactcctgcccgacaccctggtggcttgcggaggtcagcctgggaacaccctggggtggtgtgtgggtgggggctgggtcctcaacccaggcctgcctcttgctcccggcctcactgccgtctccccctccccacctgtctttattctctttgcagcagaagaccccctgctgcgcccagccggcccaccattatccgcccagccgagccatccctgctcgactaggcctcgaggggggcgtgctctcgggggggcctcacgcacccgcggcgcaggagcttcagtggtctggggccctccgccgcccctatgctgggaccaggctcccagtgggcagccctggcctcttccttaacgctggccccggtccagggccggcccctgtgcctggctggacaccgcactgcgcaaaggggccctggagctccaggcagggggcgctggggtgttgcactttgggggatggagtctcagggtggcagaggggggaccagaacccttgacaccatcctgaatgaggggtccagcctgggggggactctaccaaggtcttcttgggctgggaaagcccatgtagggcaggccttctataagtgcgggcaccaagggcgcctacatccccaggccttgctggggtgcaggggtatatcaacttcccattagcaggagctccccagcggcaagcctggcccagtgggctcggtagtgcccagctggcaggcctgaggtgtacatagtccttcccggccatattaaccacacagcctgagcctggcccagcctcggctgccagaggtgcctttgctaggcccggagccgttggcccgggccggccttgccctattcctctcctcctcctcctcctgggtcccccagggtggctgggcttgggctatgtgggtggtggtggcggggggtcttgggggcctctcagctcccgcccatgcctccctgatgggtgggcccagggcggcctctctctgaggagacctcacccactcctcgctcagtttgaccactgtaagtgcctgcactctgtattctattaataaactaaaataaagggaagacgctgctggtggctgctgtgtgggcctcttgtgttagtgttcaggctggggacatgggtgccacctccatcaggcctcccataaggatgcccaagtccctgcactcataagtgcctcccatctccctgagggctctgctttcgggggtgtcacctttcagaggaagccactcgatacaggggagagcttttactttccttagcatgtgaggagtgggagcagatattctctgaccccctgcacacccccacgtgcacaggcctggctgctgcctggtgaagcggggaccccagcgctccacccccttcctaccctcaggccctgcttctctcacctcgtggggaagcccaagcctcgtggcccaactggggctcagttaaactttgctttctgatttttctcttgtgccaggcgaccacctccatcggctcccgcacgacctttcttctgagcttcgtgggaggcccctcccacctgtctggctgccccctcgggggccggtctgtcctggctggtgtccctgagccccaatcagcaggctcttgtgattttctgaccataatttattgactccaatgcccaggccacaccaccctttgttataggaggcttctgcctagactttggccgggccatccctcatgcctgtgtggggcccctgcaggagaggggccggggcaggtggtcttccaggcccccttcctggcattctgttaccagacctcaacctggcttggagggcccaggtttccttgttaggccctgccccgcaccaggcaacgctaacacaggatgggaggcttaggctaaggcacatttacagtagaggggccaggaaatccgaggctcacgttccaacgctgcagtgcccaccatgtgagatttccaggaccgtcggtgcagccactgagccgtcccttctacaagccagaggtgttccctgcccgctgaggacggaaggagactcatggggccagaccgcaggccctgactgcacactcccgttttggcaggaaactaaaattggggagggacccccaagtctcatatgcacacaccctgctgcccctcctttgtcccgttcttccttccatggcaggggctacgtgggcaccgggcgcttgtcctggaagaagcgcttgagcgtgcagacctgcagcacagccaccagcagcagcaccgccacgttgacagctgaccagaagttgacccgctccaagttgccctcttgcaggttgcggtcacgtgcctcgaaggcccgcagtagcgtgagcatctggatgctgcgctccagccgggtccgcatggtctcaatggactcctacagggcagcgggaggggaagggtcaggcctccctccacccatcagggagcagagaccaaaaaaaccgggggatacggagggaggctgtattaaccctgggaggtacagctgcaaacacagacttgttcaggctaagttcaaatcctcaccctgccactcactggctgtgaccatgagcaacttaattaacctatctgagcctgtttcctcttctataagcttccaaattgctgtgaacatttaatgcctaaataaatgtacaaggatgagcatggtggctcatgcctataatcctagcactttggaaggctgaggtgggaggatcgcttgagcccaggagtttgagaccagcctgggctacatggcaaaaccccatctctacaaaaaattagccaggggtggtgatgtgcaactgcaatcccagctactcaggaggctgaagcaagattacacctgtaatccaaacacaggaggatcacttaaacccaggagttcaagaccaccctagccaacatggtgaaacctcgtctctacagaaaacaaaaaattaggcatggtggtgcacacccgtagtcccactgaggtggcaggattgcttgagcccaggagtttgaggctgcaatgggctatgatcacaccactgcactccagcctgagtgacacagcaagaccttgcctcgccgtagctcacacctgtaatcccagagctttgggaagccaaggcagacagatcccctgaggtcaggagttcgagaccagcctggccaacatggtgaaaccctgtctctactaaaaatacaaaaattagtcagtcaggcgtggtggcacagctattcaggaggctgaggcaggagaattggctgaacctgggaggcagaggttgcagtgagctgagatcgtgccactgcaatccagcctgggtgaccaagagagatctgttagaaaataaataaataagtagttaattaaaatactaataaatgtacagaacatatttgcttgtggttaagagcatagttgctgaaaccagcatgggttcaataccaactctgctagttggtctgtgtggccgtgagttgctcagccatcttgtatctcactttctccacctgtaaaatggggatgacttgagcacagggtctgcttcacaaggtggtttggagatttacggtatgagttatttatgatatgagttccttaaacctttacaccagggtttatacctagaaatgaactacttttttttttttttttttttttgagacggagttttgctcttattgcccaggctggagtgcaatggtgcgatctcggctcactgcaacctctgcctcccaggttcaacttccacctcctgggttcaagtcattctctggcctcagcctcctgagtagctgggattacagacgcccgccaccacacccggctaatttttgtatttttagtagagacggggtttcaccatgttggccaggctggtctcaaaactcctgacctcaggtgatccacccgcctcagcctcccaaagtgctgggattacaggcgtgagccaccgtgcccggcctgaaatgaactacttattttaagagctgctactcttactataattcagttggagggcacaactacggaggggaggctgggtcagcccaaggggggcaccccaggtgaatcctagagatctggaaggagtggccccagcgcagcctggacacaccttgatgtcctccattttaacatccagcatctcctcgggctccacagcctctgcccatccttcgacctcctcgtcatcctggaggctgtcaaagatcagttcaaagaacaccagcttctcggagatggtgctgaaggagttgtcaaagcacagcttgtagtccccggcctccgttggctccaccctgggcagacagacacacagacatgacccagggtggccagccagccgactcagcggggcagtcagggcggtaacctgaggccgcctgggaagggcagggctgtaactgaacccaggcaggcatcaagactgaactcacgtgtgtaccccatcagccttgcgggactcgctgaccaacagcacgccctgagggctctccagcgtgaagtccacgtccagtccagcacctccgatcacctggggggcaggtaagagcgggtggagggctagcggtaggccaagggcgcctgccgaagagggctacggctgaaccaacactgatcaatacagaccaccaagggcttacctgaacggcggcacacccacacccgccccaacctgtcccagtggctgcgccccttgcctccaccctcattgatatgacagcttggggtccatactttcagctgaccacgcacctaccaaaagtacttaatggacgtttacctgaccacgcccctggttggctccgcctccgaaagaggataggcccagcctttttccttagtctaacccccgagaaaggcctgtgtgggcaacgcccccgcagttgacctatcagcactatcgccacgcccaccagccagagtcctgtcctctcagaggctccctatacttatcgatggccccgccccctctggatctcttactctagccccgcctgcttcattactccctccccttccgctcccacacaccgtccccgccccatctgtccatctctttctagctccgcccccgcgctcccaagcacggattcctcccccttcctcctaaagcgcgcctcgcctcgaccgcttggccacgccccctctccctgactctgctggccgcccagcccgcgaccctctacctggtattcggtctcgaggcttgcgttggccggcgcggactggtagaaacactgcttcctccccgccggcaacaggaacgtgaactcaccgtcctggattggcgggggccccgcccctcccacctccactggtggcattagtagccacaaggccagggctagggccgcgccggccgccatcatccgggtcaccctctggtctgcaaaggggtcgcggctcctttaagcgctagccctgccccggtgctactcggcggagctcattggcagtggcttctgtatgttgtccgtaaccagaggtgccaggagtgaaggacccccccactagagggcaggcggcccgaatgaatgcctgatgtgcccagaaacactcaaccgtctgggaatatttttctcaaaggcttcggctctcttctcggccgctggtggaggaaaattacaaaaataagtgccatgatggcgcatcttttgtaggcagtagctaagacaactaaagttacaggcggcagggtcctttttagtcacctccacgtggttttcccagagtgcgccgcgcgtgacaacctttggcgggaccgacgtggtggagtggacccaaaaatagcgtctaggcgtggccctgtacgcgacccgtagggctcgcctataaaagggctggggcggggcggagatacctgtggcgtcgtgttttgcttgctctgtgagcgtggtccaggttcgacgccttttgcgccttagaggcatcagcgtatcagtttcctcgtaagtcgggagtgatggaacgaccaccctgtagtgcggctgtgagaattgagatgaggcttggttcatattgagtgctcagctttcctggcttatagacagtggaggggcgtggccccaccatgcaccccaagggtctcagactcaagggccagcaggtaaatagagccattacagtagcctcgggtcagaaaaacgacagcccaggtaggaagagataaggacagtgtgggactgggagccacgttgcctggttcagctcctgccccacccattacttgaggcattccctctgttgagcctcagtttcctcttctgcaaaatggggataataggcctacgctactgggctgtctttaggatacgtgaaatgcttgttgagtgcttgcttccgcagtgcgtgggacatcacaggccctcagtaaataataatctgttatttggttcccgtctaaacataaactgtgtacagggagatgtttagtcttcaaagataaacccggaaaaggttggcaggtgatgacaaagatccctcaaatacagctggctgttgtcagcactttcctgcatttggagaatttggggaagtagctctttgtaatatcagtttggtattccttttcactccaactttttctatcatttacactcactgcttggacaatttgaagtaacagtggagaacgggtgactccttttcttttttttctttttttttttaatttttttttcctttttttttttttttttttttgagacagagtctccctctgttgcccaggctagagtgcagtggcgcgatctcgactcactgcaacctccgtctcctggggttccagcgatcctcctgcctcagccttccgagtagctgagactacaggcacgtgccaccacacctggctaattttttgtatttttagtagagagggggtttcaccatgttagccaggatggtctcgatatcctgaccttctgttccatccacctcggcctcccaaagtgctgggattgtaggcgtgagccactgcacccggccggattttttttaggacagggtcttgctctgttgcccaggctggggtgcagtgacgccatcatggctcactgcaatctctacctcctgggctcaagtgattctcccacctcagcctcctgagtagctgggactacaggtgtacacctccatgcctaactaattttttgtagacatgaggtttccctgtgttgcccaggctggtttcaaactcctgggctcaagccatctgcctgctccctcaccctcccaaagtgttgggattactaaaattgatttttttaaatacagtaaaattcacattgcataaaattaacaattttaaggccgggtgtggtggcttacacctgtaatcccaacacttttggaggccaaggcaggcggatcatgaggtcaggagatcgagactatcctggctaacacagtgaaaccccgtctctaccaaaaatacaaaaaattagccaggcgtggtggcgggtgcctgtagtcccagctactctggaggctgaggcaggagaatggtgtgaacctgggaagcggagcttgcagtgagcccagatgatgccactgcactccagcctgggcgacagagcaggactccgtgtcaaaaagaaaataaaaataaccattttaaaattaacaattcagtggcatttagtacattccagtgttgtgcagtgacttctatgtagttccaaaacattttcatcggctcagtaaagatccctgtacccattaagcagtgattctgaaacggcctcgttgtcttgagtaacacccggggtcgttgtctcacagccacgaagaacaaggaccaggacacacaaaagaatgaggttgagaacgaacgtttaataggcaacggagagtatagctctctgctacagagaggagtcccagaaaaatgggttgctggtccatagcaaaatacaggggggtttatagatgagctggtgaggagacttagcctgatttacataggggatgaaaaactggttagaacaggtgtgccatttgcatagggtgtgaatttctggtatctgctaatcttttattatgcagccggggtctctacctgagctgtgccacatcgcccatttctttttctttttttttcttttttttttttgagacagagtcttgccctgtcacccaggctggagtgcagtggcgtgacctaggctctccgcaacctccgcctcccaggttcaagggattctcccgcctcagtagctgggattacaggtgcctgccaccacgcccaactaattttttgtatttttagtagagacaggatttcaccatgttgtccaggctgatcttgaactcctgacctcatgatccgcccaccttggcctcccaaagtgctgggattactggtgtgagccaccttgaccagccccatgttgcccatttcttagttcctgtacacgtggtagcaaaaaaggggagatggagcctccgtgttggatatgcctggctcccaggtagccattttctgttggtgcagctgccagcattcccacgtgcaagcttccagcttccttatctatgtttgcagcttgagttttcaggctgctatttattagaaaagaaatgatatcaggggctactttctgttagaaaagaaattctgctgaggactctttgccctcactgcctgcctaaatactttctatctcctgtatcaactcctcattacactttgccccccgcctctcaactagctatgtgctttttgcctctagggatttacctactctggatatttcatatgaatagaagcagacaatgtgtcaccatttgtattgaacttcttttacttagcatgtttctagggttagaccatgtatcaatatttaattcctttttatggctgagtagtattctattgtatgtacataccacaatcaatttttcttttgttctttttttttttttttttgagacagtctcgctgtgttactcaagctggagtgcagtggtgtgatcacagctcaccgcaccctccacttcccgaactcatgtgatccacctcagcctcccaagtagctgggactacaggtgcacgccaccacacctggctaattatttttctgtggagacaagaggtctccctgtgttacccagactggtctttaactcctgggcttaagtgattctcctgcctcagtgcccaaagcgctgagattacagttgtgagtcactgtgcctggccccacaatttctttagccattcattattgagggacagtagagttatttcaaccttttagctattgtgagtacagctgctgttaacatgtatgtatgtgtattttattacttgcgttcagttctttggggtatagatctcgtggtggaattgctggatcctatggtatttctatgtttaactttttgaggaacaaccaaagtgttttccacagtggctgtactgttttccattcccaccaaccacgtatgagggttccagtttctctacatcctcaccaacacttgttactttgcattttgttttttgttttgttttgtttttgagacagtctcactccttcactttggctggagtgcagtaactgcaatctccatctcccaagttcaagtaattctcctgcctcagcctcccaagtagctgggattacaggcacatgccaacacacccagctaatttttgtaattataataaagacagatttttgtttttgtttttgtttttgttttgttttgttttgagacggagtcttgctgtattgccaggctggagtacagtggtaccatcttggctcacttcaacctctgcctcccaggttcaagtgattcttctgcctcagcctcctgagtaggtgggactatgggcgcatgccaccatgcccagctaatttttgtatttttagtagagacgtggtttcaccatgttggccaggatggtctcaatctcttgacctcgtgatctgcctgcctcagcctcccaaagttctgggattacaggcgtaagccaccgcgcccagcctagagacaggtttttgccatgttgaccaagctggtctcgaactcctgacctcaagtgatctgcccacctcggcctcctaaagtgctgggattacaggcgtgggccactgtgaccggccctgttttgtattttttgtttgtttgtttgtttgtttattatagccaacctagtgtatgtgcatttcccaaatgattagtaaggttgagcatcttcttatctgcttctcggtggtgtgtatatcttctttggaaaggtatccattcatgtcttttgcccatttaaaaattgggttgttcatctttttgttgtaggaggttttttaaacacatattatagagaggaaaagatagaaaagtgaaacaaaaaaacttctctagctggaccctcatgcttgtaatcccagcactttggaaggctgaagccagaggatctcttgagccaaggagtttgagaccagccttggcaacgtagagagactctcccgctcctaccaccatctttacaaaataataaaatattagccagttgtggtggcatgcacctatagtcctagctactcaggaggcagaggtgggaggctcgcttgagcccaggagttcaaggctgcagtgagccatgattggcccactacactccagcctgggtgacagtgagaccctgtctcataaacacacacaaaaaaataccctctcgcggccgggcacagtggctcacgcctgtaatcccagcactttgggaggccgaggtgggtagatcacaaggtcaggagatcgagaccatgtcccttgagtaaacaaaaccaaaaactctcctccctaattattcaccaaatatttactgagcctctgacagtgaataaaacagacactgtcaaagccaggtggagtggctcacgcctgtaatcccagcattttgggcggccaagttgggaggatctcttgagcccaggagttcccgactagcctgggcagcatagtgagatcccatctccacaaaaacattttttaaaaaattagctgggcatgggaacaatcccatttcctgagggaatgggaggatctgtctacttttcttatcctgattcaaatggaatgccagtgtggcaactcctaggatttgtcacgaatgggaagccaagtgccatcttcaaaatttcaggtcttaaatctggagaaggaagccaacatccttttggagccatgaatattgtccgaactccatctgttgctcagattggaatttcagtggaattattggacagtatggctcagcagactcccgtaggtaatgctgctgtatcctcagttgactcattcactcaggcccagatgacaccaagcccatctgaaatgttcattccggcaaatgtggttctgaaatggtatgaaaactttcagtgatgactaccacagaaccatctcttggaaaacataatttgaataaaatacttttttttttttttgagacggagtctcactctgtcacccaggctggagtgcagtggcgcgaccttggctcactgcaagctccgcctcccgggttcacaccattctcctgcctcagcctcccgagtagctgggactacaggtgcccgccaccatgcctggctaattttttgtatttttagtagagatgggttttcaccgtgttagtcaggatggtcttgttctcctgacctcgtgatccgtcggccttggcctcccaaagtgctgggattacaggcgtgagccactgcgcctggctaaaataatttttaatggaaaaaaaaaaagtagctgggcatggtggcacacgcctgtagtcccagcaacacaggaacctgactcaggaggatcgcttgagcccaggaggttgaggctgcagtgagccatgattgcactactgcactccaacctgtgcaacagagagagaccctgtctcaaaaaaaaaaaccagaattccaggttgtagattccttcaccatattgactcaggatttttcttagccactttgccagccggggacatctatggccggcagtgccccctaccacccgcaagggcatgacactggaggcaccctgcccactcagcccacctgtgttatagcttgtatctgcattcggcagttctcaagctcttgtcctgcatccaagaagaatgaggaaatgctgacaattgaagggtgaagatgggaggagaatttttttgagcgacagaacagctctcagcaaagaggagatgtgggggtgtggtttatctttcagtgtggctggatccggggctttttatggactcagaatggggaatgtgtgctgattggattgtgagtgtgcaaaaaaggttaaagcgaagacaccactcaaaggtgggtccaacagtatagaaaaccaattaggaaagggtaggtatatgcaaactaggtggagggtggggatcaatctgaggaaagcacgccaaatagaagacagattctctgtccagtccctggatttgacttgtagctttgctttcaggctttaaactgtctttggcttggaggtggggtttcaccagggacctgcccctatctgcctaggcatttgtctgcctcttgccactatcaatatcaatcagaaggcttccctgaccctgctgtagctgggttgagccccctcggccactgcctctgttactgcacttcaccactggactctccttgtcttcttgtctgactcttgaacgctgagctccttgaggacaggagccattttcattcatcctaatgtctctggcacaattctgggaacatgatgatgctcagtactcagttggtggaaaaaataagccaggaatctctcttaactccatctcctgtacacccagtatacagccacagaagtggcttgaatggatgttttttttcgctgtcaggtcagatgattgagaaatatttatgatgtgccaagcatggtgggagacacgggacactgcaggtaacaacacagaccccatccttgtgctccgagaggaggaggaaagctgtgttaagatatcatgaaggctgggcatggcggctcatgcctataattccaacacttcgggaggtgggcggatcattcgaggtcaggagttcaaaaccagattggccaacatggtgaaatcctgtctctactaaaaatccaaaaattagccagccgtagtggtgcatgcctgtaatcccagctactcaggaggctgaggcaggagaatcacttaaacccggaagatggaggttgcagtgcagccgagattgcgccactgcactccagccggggcgacaaagtgagaccatgtctaaaaaaaaaaaaggctggacacggtggctcacgcctgtaatcccagcactttgggaggctgaggtgggtagattacgaggtcaggagttcaagaccagcctgaccaacatggtgaaaccctgtctctactaaaaatacaaaaattagccaggcatggtggcacacgtgtaatccccgctactcaggaagctgaggcaggagaatcgcttgaacccaggaggtggagtttgcagtgagatgagatcgcaccacttcactccagcctgggtaacagagtgagactccgtctcaaaaaaaaaaaaaaaaaaatttaaaaagctaggcgtggtggctcacgcctgtaaccccagcactttgggaggccaaggtgggaggattgcttgagctcaggagttcatgaccagcctgagcaacatagcaagaccctgtctctgtttaaaaaaaaaaaagaaaggccgggtgcagtggctcacgcctgtaatcccagcactttgggaggctgaggcgggcagatcacaaggtcaggtgatcaagaccatcctggctaacacagtgaaatcccgtctctactaaaaaatacaaaaaattagccgggcgtggtggcggttgcctgtagtcccagctactcgggagactgaggcaggagaatggcgtgaacccaggaggtggagcttgcagtgagccgagattgcgccactgcactccagcctgggcgacagagcgagattccatctcaaaaaaaaaaaaaaaaaatgaaggaggctgggcgtggtggtggcttacgcctgtaatcccagcactttgggagcccaaggtgggaggattacttgagcccaggagtttgagaccagctaggcaatgtagtgagaccctttctctacaaaaaaaaaaaaaaaatttagccaggtgccgtgcatgcctgtggtcccagctacttggaaggctgaggtgggaggatcacttgagcctgagagatggagactgcagtgagccatgattataccactgcactccagcagcctgggcaagaaagcaagaccttgtctccaaaaaaaaaaaaaggcatgaggatgaattcaataaattcaagaatattctgtgtactaccttgaccaaattgtattaatatttagagaatattataccaaacaactacaccgtgtacttgaatttctagcgtacgtacaatgtggatcgagataccctgcaccattctaaaaagtcagtacatttcaaagtattgaaattatatgaccacaaaggagttaaaaatcattaacagtaagctgccccccaaaaagcccaagtacttgggcattaagcaacacacatattctctggatcatagaaaagaaagcacaatggaaataagcaaatatttctaacttaatgacgctcaatatatgaaaatgtgtggcatgcagttaaaacagttcttggagggaaaggtgtacctttaaatgcttgtattagaagataaaggtgggccgggtgcggtggctcacgcctgtaatcccagcactttgggaggccgaggcaggtggatcatgaggtcaggagatcgagaccatcctggctaacatggtgaaaccccatctccactaaaaatacaaaaaattagccatgcatggtggtgggtgcctgtagtcccagctactcaggagtctgaggcaggagaatggcgtgaacctgggaggcagagcttgcagtgagccgagatcacgccattgcactccagcctgggcgacagagcaagactccgtcaaaaaaaaaaaaaaaaaagagggtttaaagttaatgagctgcctgtaatcccagcactttgggaggctgagtcaggaggattgcttgagcccaggagttcaagatcaggctgggtaacataataggaccctgtctctacaatttttttttttttaattagccaggtgtggtggtggacacctgtagtcccagctactcaggaggctgagatgggatgatctcttgagcccagcagggtgaggctgcagtgagtcatgatcatgctgcttcactgtagcctgagcaatagagcaagaccctgtctcaaaaaaaaaatgtttttttgttgttttttttttgagacagagtctcgctctgttgcccaggctggagtgcagtggcatgatctcagctcactgcaagctctccttcccgggttcacgccattctccagcctcagcctcccgagtagctgggactacaggcacccactaccacatctggctaattaaaaaaaatttttttttaataaaaagagtttatataagcatccatcttaagaagctattaatacaaatttctgctggtgaagtttaaatttaaaaacaaaacatgagctaggaaaagaagagccaattgaacataaggtaaccagaaaaaagaaaagaataaagtcaagtcaaaaggcaataaaatagaaaataaaacaacaaatccaaactgtggcactttgaaaagatcaataacaatgattagctcctaggaagaccgataagagacaaggagacttcactaatttatgtgtcaggaatgaaagaaggaacatcactacagaccctacagacattaaaaggatagtaaggggatataaataactttacaccaatacatttgacaactctgatgaaatgagcaaattccttgaagatacaagcatgccaattgcaataaaggaatattacagggcactgtgggagaatttagctaggggattgttctaagtccagaggggcctggaaagttttcccagaagtgctatttaaactgagacctgaaggagaagcaggatttgaccaggttgacagaattgtgttccaggccagggaaatagtgtgtgcaaaggccctgaggttggattgaactttctgtgtccaaagaaaaaagtttactctaatgacgcattttggtgtttgatgaccacatgccacatccttcttgggtccaaacccccaagcaaacctgactggcttgaacagaaatgtttaaaaagataaatgcaaacccagtagtaagagaaacttggaagtttctgggctgtaaacaggaggcagtttatcctgtgaactatatcacaaactatatccagaattgatctggaactggtattccctttcatgtggctgatcaaacttctgagtctttttcctccctgtaactttaccttgtgagcatgcactacccactaggcgttgcatttcctactacaagttctttgaatctaatgtccactgctctttttttttttttttttttttgagatggaatttcactcttgttgcccaggctggagtgcaatggcgcgatctcaactcaccacaatctccatctcctgggttcaagtgattctcctgcctcagcctcccgagtagctgggattacaggcgtgtgccaccacgcccggctaattttttgtatatagtagagacggggtttcaccacgttggcctggtctcgaactcctgacctcaggtgatctgcccacctcagcctcccaaagtgctgggattacaggcgtgagccaccacgtctggcctaatgtctactactcttagccccattctgcagagcagtatactgaagcctcaaaggaggtaagccatgcctgaggtcacagaggccaagccctaaccaccatgtcctcccactcctgcccatatttgtttaaatgttggtgctggttaggctatggtttgtgtcttgggcatgggtttccaaacatcccactgctgtcaccctgtctcattcccaggagttctcttagaaggagagacaaaaggctgggcacggtggctcacgcctgaaatcccagcactttgggaggctggggcgggcagataatgaggtcaagagatcgagaccatcctggccaacacagcaaaaccccgtctctactaaaaatacaaaaattagctgtgcatgatggctcctgcctgtagtcccagctactcaggaggctgaggcaggagaatcactcgaacctgggaggtggaggctgcagtgagccgagatcgctccactgcactccagcctgggcaacagagcaagactctgtctcaaaaaataaaaataaaaaaagaggaaaaaattgtgaaaaccacctaaacatctcatccatttttttcccctctaatctgcagaaccgcaaccagagaggtgcgcgggtctgatgtgtgtttggggaaggggtggggaggggagagagtccctttcagtgcccaagcctgtgtgtgcaacttcctgccagtgaggaaactctcagctcgagaatcagccctggttctcctttccccgatctggcctcacaggaggagttggcggggagccttgggcccctctggcctcagccggatttcccagccaaacgcagagagagatgccctggaccatcttgctctttgcagctggtgagtctgaagcccccctctcagatcccccacgcctttccccccatcctctgtccaccttgccgctccaggggcagaaaccagtgcaggggctgccgttctcagggcatcgaggaggctgagcccttggcagatgggttttccccctgagccttggaaactctccagtagtgttggttttttcttcttaggctcctcatcacccccaagtttatgaatatcagaaatatcacccctctggagtcagctgtgcccacaccccatgattcagccccgcttcgtctctgaaggctccttgagtgctggggcagcaggagggtctacctagggggatatcagtgtggcaggggtgggtgggggttggaggctggacgagggagggtttgtatagacctcacctggccagacactctgctcagaagcctgtgggcaatcaggagagagatggatccccaggagaccatcctgcaggaagccgtgctccaaaatccgtattcttcacccaagcctgggaaaggagataaaagtcctctgcccttccttctcctgccctccctctcactcaccccctccccttcctgccacccacctcactcaccccctccctcctgccatgatggcctccttgctgctccttttttaatatttatttttatttttaaatagagacagggtctcactgtgttctccaggctagtctcaaattcctgggctcaagcagtcctcccaccttggcctcccaaagtgctgggattacaggcgtgagccactgcatcaggtgtttgctcctccttaaacacccccattccccttccatcccctggacctttgcctatgctgttccctctgttggaatgcccttccccagctctccaaatgggtccttcctcaccactcaggactcagctcgtgggaggccaaggtgggaggatcacttgaggtgaggatctgggcaacatagtgagatcccatctctacacaaaataagcaaaattagctagccaggttcaccagcctggccaacatggtgaaaccccgtctctactaaaaatataaaaattagccaggcatggtggcacatagtcccaggtactcaggaggctgaggccactgtactccagcctgggcgacaaagcaagattttgtctctaaataaataaataaagtaataataaattaaataaaaaataagagtatagttgtgttgctatgtaataaccaatgctattattgaaaactgatggccaggcatggtagctcacgcctataatcccagcactttgggaggccgaggtggggggagtcacacgaggccaggagttcgagaccagtctggccaatatagtgaaaccccatctctactaaaaatataaaaattggccaggcatagtgccacatgcctgtaatcctagctacttgggaggctggagaatcacttgaacccgggaggtggaggctgtagtgagccgagatcacaccactacattccatcctgggtggcagagtgagactccgactcacaaaaaaaagaaaaaagaaaagtaattcaactacagggagccgtcaccatgtgccaggcagtgtggggtagggtcactagcctcctgactcacagaaaacacaaggctgagggagggtggtctacttgcccgaggccacatagccagggcagcctccactctcaccacgcacccacccaccttaccctctgcattgcaggctccttggcgatcccagcaccatccatccggctggtgcccccgtacccaagcagccaagaggaccccatccacatcgcatgcatggcccctgggaacttcccgggggcgaatttcacactgtatcgaggggggcaggtggtccagctcctgcaggcccccacggaccagcgcggggtgacatttaacctgagcggcggcagcagcaaggctccagggggacccttccactgccagtatggagtgttaggtgagctcaaccagtcccagctgtcagacctcagcgagcccgtgaacgtctccttcccaggtaaggcccttctatgggatctcactgccgggggcttaattttctcacatggacctcttgtgtgtactgttgactcagaggccttcccagaaaaagccaggcttacaccctgccaggacttactcgcctttcctttttcaatcttctcagccagcccaaaaggggatttgttggttcactgagcttaagtcagctcacagggccgacttcaggtatggctagatccaggtgctgaaagctgtcagggaccatttgccccatctctgctccacattcttctccgtcttattgtcaggcagcccgtctccctcttggtgccaaaattggtgctgtgattcttcccattttgcagataaggaaactgaggcacaggaggtacacaccttgtacacaggtaacaggtagccagtctgggatgccattgccttccaaaaaccatgaattacacctccgtgacatacattacttcccctcttggccacatactttttttgtttgtttgctttgagatagttatgctcttgttgcccaggctggagtgcagtggcacgatcttggctcactgcagcctctgcctcctggttcaagcgattcttctgcctcagcctcctgagtatctgggattacaggtgtgtgccaccatgcccggctaatttttgtatttttagtaaagacaggatttcaccatgttggccaggccagtctcgaacccctgacctcatgatccgcctacctcagcctcccaaagtgctggaattacaggcatgagccactgcacctggcttttttttttttttaaatgagacaaggtcgtgcagactagagggcaatggcacaatcatagctcacttcatcctccaattcctatcctcaagtgatcctcccacctcagcctcctaagtagctgagactacaggtgtgcaccaccatgcccagctaatttaaaaaattattttagagatgagggtctaaaatgttgaccagggccggacatggtagctcatgcttgtaatcccagtactttgggaagctgaggtaggtggatcacctgaggtcagagcttaagaccagcctggccaacatggtgaaaccctatgtctattaaaaatacaaaaaataggctgggcgtggtggctcacgcctgtaatcccagcactttgggaggccgaggcgggtggatcatgaggtcaggagattgagaccatcctggctaacaaggtgaaaccccgtctctactaaaaatacaaaaaattagccgggcgcggtggcgggcacctgtagtcccagctactcgggaggctgaggcaggagaatggcgtgaacccgggaagcagagcttgcagtgagccgagattgcgccactgcagtccgcagtccggcctgggcgacagagcgagactccgtctcaaaaaaaaaaaaaaaaaaaatacaaaaaatagctgggtgtggtggcatgcgtgtgtaatcccagctactcaggaggctgaggcaggaggatcatttgaatctgggaggcggaggttacagtgagccaagacagtgccattgcactccagcatgggtgacagagcaagattctgtctcaaaaaaaaaaaagatattgaccaggctagtcttgaactcttaacctcaagtgatcctcccacctcggcctccagagtagctgggattacagatgtgagtcaccatgcccagcatgagccacataaggtttctgagcacttactatggaccaagaactgtctttgggcttgcccaaagacattccaggctgacattccaggcggatgaggacagatgataaacatgaaatccaatatatattcaacctgccagcagggcaccagatgaaatccacctgggtgaggatgtcattatttgaagtagagtagggcgactggccccatgttctaatggtcagccctctggactctgaagtagagtagggcaatcagggaagccctctctgaggaggtggcatttgagcaaaaaactgaatgatgaggaggagccaatcatgtggatatccagggcatgtgttgcaggcagaggatacaggatgtgcaaaggccccgaggctgaagcttccctggtgtgtctgaggagcccagtatggctgaaggatggtgaacaaggaggaaaatggggagaggcggggcagggagttcaccaggaggatcgtggggggtcttgtagaccacagcaaggattcgatcttttcacctgagtgagggaaccctggcagggctgatgtccttttctgatctctgaatgaggaggctggacatgggttatgggtcaagaagcaggagggaggagcctttggtggccttctgtgttaccatcagtcagaactttcctggccgggtgcaatgacccacgcctataagcccaggactttgggaggctgaggcaggacgattccttgagccaaggagttcaagatcagcctgggcaacatagtgagaccctgtctctacaaaaaaaaaaaaaaattattttattttttttttagataggggtcttgctttgttgaccaggctagagtgcagtggcgcaatcacagctcactgcagcctccacttcctgggctcaatcaatcttcccttctcagtctccctagcagctgggactacagccgtgcaccaccacgcctggctaatatgtctattttttgtaaagacagggactcactctgtcgcccaggctggagtgcagtggtgtgaccccagctcactgcaatctctacctccgaggttcaagcaattctcctgcctcagcctctcgagtctcactgcaacctctacctccgaggttcaagcaattctcctgcctcagcctcccgagtagctgggattacaggcgtgcaccaccatgcccagctactttttgagttttagtagagatggggtttcacaatgctggccaggctgctctcaaactcctgacctcaggtgttctgcctgcctcggcctcacaaagtgctggaattacaggcgtgagccaccatgcccagctccccccaattttttttttttttttgagacagtctcggtctgtcgcccaggctggagtacagtggcacgatctcggctcactgcaacctctgcctcccgggttcaagcgattctcctgcctcagagcctcccgagtagctgggactacaggcatgtgccaccatgcccagctaattttttgtatttttttttttagtaagaaggggtttcacagtgttagccaggatgatctcaatctcctgatcttgtgatccgcccacctcagcctcccaaagtgctgagattacaggcgtgagctaccccgtccggctaatgtttttttttttttttttttaattaggagggactgctggcatgtgtcagtaggctgaggcaggtggatcacttaagccggggaggtagaggatatagtgagccatgatcgcaccactgcattccagcctgggtgacagagggagaccctgtctgtaaaaacttttttttttttttaatttttgagacagagtctcactctgtcgcccaggctgaagtgcagtggcccaatctcggctcactgcaacctttgcctcccaggctcaagcgattctcgtgcctcagcctcccgagtagctgggactacaggcgccaaccaccacaccctgctaatttttgtattttttagtagagatggggtttcaccatgttggccagggtggtcttcaactcctgacctcaagtgatccgcccacatcggcctcccaaagtgctgggattacagccatgagccaccgcgcctggcccaaaaaaacttttaaaaagaactttttcactgcaaaaaataatcttgttgccagccgaggccaacatgcagctatgacagggcagttctctgtccttcccggcctcaggctcctctatcaaaggcccccttctctcaccttggccttgtggccttggagtagggagctgacaacaccccttctgccccaggtgaatcaatgaacaaggctgacattgtgagaataccaagcgtctgtcttcttccctcttctggcttagctcctcacctcccttggggtcagggcatctcctctttctccaggaaggggaagcgaagtcttgtgctgagaaggtgactctggaactgccactcccatgcctgtgtgactagcttctgggtggatctcagggtctaccgttgggctgggggtggatgtcatctggccactggcacccagactgcaagtaataaaaacctgactcacactggctctaccagcaagaggggatttgttggttcactgagctgaagtcagtttacatggctgacttcagatatggctggatccaggtgctgaaaaatgacagaaagcatttgccttctcagctcctcttctgtcttattctcaggtagtttctccccctcatggaggcaagattgtgccctgaagcttcagatatatattctttttttttttttttttttttttttgagacagattctagctgtgtcacccagactggaaggcaatggcccaatctcggctcactg
